United States Patent Application Publication US 2008/0034453 A1 - sequence listing, part 37

SEQ ID NO: 293976 - DNA, 268 bp, Glycine max
  unsure (1)..(268): unsure at all n locations
tctagttctggattccgactcgccgcattgactcggtccgggttggggtcgactcagttcggtttttcantctctcgcgaatctaatctataggaaaagctaagggcacatcacaatgaaggcattgattctggttggggggtttggaacaaggctgaggccactgacactcagttttcctaagcctcttgttgattttgctaacaaacctatgattctgcatcagatagaggcccttaaggccattggagttactgaggtggtgcta

SEQ ID NO: 293977 - DNA, 267 bp, Glycine max
  unsure (1)..(267): unsure at all n locations
gcatgcagccactgcttgagttcctcaggcttcacagttataagggaaagaccatgatgttgaatgacaaagttcaaagcctggattctctccaacatgttttgagaaaagcagaagagtatctgatttcagttgctcctgaaacaccctaactcggaattcgagaaacagattccgggagattggtctggagagggggtggggtgacatgncgancgtgtcctcgagatgatccagttctctggacttcttgangcactgaccttg

SEQ ID NO: 293978 - DNA, 267 bp, Glycine max
  unsure (1)..(267): unsure at all n locations
tgttttcttcgttgctacaattttngtagcatggcaatgccatgcgtacgatatgttccctctccgaatgaacactggctatggtgcccgtactccggaggtgaaatgccgcaagttggaggcttgctgtggaagcacacaacatctttggctttgagaccattcctgaagagtgcgttgaagcaacaaaggaatacatccatggcgaacaatatagatcagactccaaaacagttaaccaacaagcttacttttatgccngagact

SEQ ID NO: 293979 - DNA, 266 bp, Glycine max
  unsure (1)..(266): unsure at all n locations
tgagcgtgttctgtatgtggacattgatatccaccatggtgntggtgtagaggaggccttttacaccactgacagggtcatgactgtttcgtttcataagtttggggattactttcctggaacaggtgatattcgcgatattggatatggtaaagggaaatattattcactaaatgttcccttggatgatggaattgatgatgagagctatcagtccttgtttaagccaataatgggaaaggttatggagatttttaggcctggtg

SEQ ID NO: 293980 - DNA, 266 bp, Glycine max
  unsure (1)..(266): unsure at all n locations
accaagtccatggaaaaaattggcctggatatgcgcgttgctgctctagttaatgataccattggaacattagctggaggcagattctacaatcaggatgtcgttgctgctgtgattcttggtactgggacaaatgcagcatatgtagaacgtgcacatgctattccaaaatggcatggccttataccnnaatcaggagatatggttataaacatggagtggggtaatttccgatcatcacatcttcctctaacagaatatgatct

SEQ ID NO: 293981 - DNA, 266 bp, Glycine max
gatggccttaaggcccatgctgcaaaacatgtgactgaaaaaatgatgcttaatgctggtaacatttacccccacaacaccccaaaaaccaaggaagcatattactacagaatgatctttgagaggttcttccctcagaactcagctaggctcactgctcctggaggagcaagtgttgcatgtagcacagccaaagctgttgagtgggatgctgcttggtctaacaaccttgatccctctggtagagcagcattggagtgcacatt

SEQ ID NO: 293982 - DNA, 265 bp, Glycine max
ccagtagtcatatgcttgtctcaaagattaagccatgcatgtgtaagtatgaactaattcagactgtgaaactgcgaatggctcattaaatcagttatagtttgtttgatggtatctactcggataaccgtagtaattctagagctaatacgtgcaacaaaccccgacttctggaagggatgcatttattagataaaaggttaacacaggctctgcctgttgctttgatgattcatgataactcgtcggatcgcacggcctttgt

SEQ ID NO: 293983 - DNA, 264 bp, Glycine max
  unsure (1)..(264): unsure at all n locations
gaaaactctgcaaacatgttggtttatcaggacctcnttacaggtgatgagcttctcctcggactccttccgttacaatgaaattgagaatggaatgctgtgggaagttgaggggaagtgggttgttaagggagcagttgatgttgacattggtgcaaacccttctgctgagggtggagaagatgagggagtcgatgacgcagctgttaaggttgttgacattgttgatacattcagacttcaggagcaacccgcttttgataa

SEQ ID NO: 293984 - DNA, 254 bp, Glycine max
  unsure (1)..(254): unsure at all n locations
gttcaaactctgtcttccctgggttctatttngaaatcaacgacgatgagttccacagaggcagcagccacagagaagaaaggtggaagagggaaaccgaagacttcaaagtccgtttcccgttcctccaaaggcggccttcagtttcccgtcggccgtgtcgctcgctacctcaaggccggtcgctacgcccagcgcgttggctccggttcccctgtttatctctccgcggttctcgaatacctcgctgccga

SEQ ID NO: 293985 - DNA, 235 bp, Glycine max
  unsure (1)..(235): unsure at all n locations
tcggagaacgaaaaggaatcccaatangctctggggctcttanngatgctcctcttcttcatngcttcttcctcttcctctcacctcgttcgtnccttccgatgacnccgacgacgcgatcttctacgagtcattcgacgaggattttgacggacggtggattnngtccgacaaggaggattacaacggtgtctggaagcatgctaagagtgatgggcatgatgntatggacttc

SEQ ID NO: 293986 - DNA, 254 bp, Glycine max
  unsure (1)..(254): unsure at all n locations
gtgagtagtaatggtcatggatgttgcaaatcagggccaggctatgcttccccactggaagccattncctggtcccagagagtctctcatttatgtaacctctgtctacacagggaccggaanagagaagccagactatttggcgacagtggatgtggatccaaactctccaacttattccaaagtcatccataggcttcctgttccttatttaggtgacgaattgcatcacacaggctggaattcagnagcnc

SEQ ID NO: 293987 - DNA, 246 bp, Glycine max
  unsure (1)..(246): unsure at all n locations
caacgaggttgtgtacacgaagaaggggtacaccgactnaaccggagcatacacaatgtacgtggatgaggatcacgcagatcagatctgcagtgccaagcttgtaagcagccctcaccctcaatgcaaggaagtcaccccaggccgcgacgaagccgtcgtgattctcacccgctacaacggcattgcctccgacgataggttcgccaatgccatgggcttcatgtctcaggaggttgcttctgg

SEQ ID NO: 293988 - DNA, 246 bp, Glycine max
  unsure (1)..(246): unsure at all n locations
ctcacacacagtgcttgtttngactagtgatcttccatggctgtgaaggatagaatcctggtcttgggacccacaggagccattggaaggcacatagtttgggcaagtttaaaggcagggaatcccacttttatattggttagggacacccctgcctctgttaacaagccaaggctgtccactgctgctaatcctgaaaccagggaagaactcattcagagcttccaaaattctggagttactcta

SEQ ID NO: 293989 - DNA, 248 bp, Glycine max
  unsure (1)..(248): unsure at all n locations
ggcncttgcacatgggttagtccgatcctaaggnacgggggaagcccgtctgatagcgctctgtgcgcgtactccgaaagggaatcgggttaaaattcctgaaccgggacgtggcggctgacggcaacgttagggagtcnggagacgtccggcnggggccccggaaagagttatctttcagnnaaanacntgcccaccctggaaanggctcagccggnngtaggctcccaccgctnaagacnacgccc

SEQ ID NO: 293990 - DNA, 252 bp, Glycine max
tgttcaagctggtcaatgtggaaaccaaattggaggcaagttttgggaggtgatgtgtgatgaacatgggattgatgccactggaaattacgtaggtaactttcatcttcaacttgagagggttaacgtgtactacaatgaagcaagtgggggacggtatgttcctcgagctgtgcttatggaccttgaaccagggaccatggatagcttgcgttctggtcctttggaaaaatattcagacccgataacttc

SEQ ID NO: 293991 - DNA, 247 bp, Glycine max
gccggtcgatccgggcggaagacattgtcaggtggggagtttggctggggcggcacatctgttaaaagataacgcaggtgtcctaagatgagctcaacgagaacagaaatctcgtgtggaacaaaagggtaaaagctcgtttgattctgatttccagtacgaatacgaaccgtgaaagcgtggcctatcgatccttagtccttcggaatttgaagctagaggtgtcagaaaatccacaaggataagg

SEQ ID NO: 293992 - DNA, 244 bp, Glycine max
  unsure (1)..(244): unsure at all n locations
gcgcangtaagggagcaggctcggtcttcaagtcccacacgcaccaccgcaagggccctgcacgcttccggagcctggacttcggggagcgcaacggctacctcaagggcgtggtcaccgacgtcatccatgaccctggccgcggcgcgccgctcgccaaggtcgccttccgccaccctttcagatacaagaagcagaacgagctcttcattgccgccgangcctctacaccggtcagttcatc

SEQ ID NO: 293993 - DNA, 245 bp, Glycine max
  unsure (1)..(245): unsure at all n locations
cngcagcantggtgtacgtcaaggctcagaaatcaaaagcctacttcaagagatatcaagtcaagttcaagagaagaagagagggaaaaaccgattaccgtgccaggnttcggttgattaatcaggacaagaacaaatataacactccgaaataccgatttgttgttcgcttagcaacaaggacattgttgcacaaataatatctgctagcatgctggcgatattgttctgctgcagcatatgca

SEQ ID NO: 293994 - DNA, 249 bp, Glycine max
gtgatcatcatcatcacaaggatgaggacacaagtgtccctgttgagaaagttgaggttgttgaaacagcacatgctgaggaaaagaaggggttcctcgacaagattaaggagaagctaccagggcacaagaagacagaggaggccacagctactactcctcctccaccaccacctgttgcatcattggagcatggtgaaggtgctcatcatgaaggagaggccaaggagaagaaaggtatattagaaa

SEQ ID NO: 293995 - DNA, 256 bp, Glycine max
  unsure (1)..(256): unsure at all n locations
ggctcccaagggtttaacctttctggctgtgttaatatgcgtttnagcactgtcactgagtccttctgttgcanggggaagggcaaaataatggccttgttatgaacttctacaaggaatcatgcctccaggctgaagacatcatcacagaacaagtcaagcttctctacaagcgccacaagaacactgctttctcctggctcaggaacatcttccatgactgtgctgttcagagttgtgatgcttcatgttgcng

SEQ ID NO: 293996 - DNA, 265 bp, Glycine max
  unsure (1)..(265): unsure at all n locations
atgccatncctcaaatgggaatccatcaaaccaactgttataactgtccctngcaaagccttggccattgttatantcaacagccaaacccacgagatcttaantgatctaaaggcaaggcgcattgtctccgacaatattcactccgggaatggcttccctaccctttccgttgatgaacaagtcgttgccatagagctgccactgaaatacggtccattcattgagtcagtgaacaagagagggctgaacctctctgaggtgg

SEQ ID NO: 293997 - DNA, 257 bp, Glycine max
agaagtttcctgctagactttttgcagtcgctcctcgaatagcccagggagctattccaggggttacagctgaatcttatcaagaggacaacaaattatggaaaaagcatgttaacgcttacaaaagaatgaataaattgattggcactactagatatcggaatgtgatggacatgaatgcaggccttggaggatttgcagctgcacttgaatcacaaaagtcttgggtgatgaatgttgtgccgtcaattgctgag

SEQ ID NO: 293998 - DNA, 256 bp, Glycine max
tctctctctcgatcaatcatggctttgcccaatcagcaaaccgtcgattaccctagtttcaaactcgtcatcgtcggtgacggtggtacaggaaagacaacgttcgtgaaaaggcatcttaccggtgaatttgagaagaaatacgaaccgaccattggagtggaggttcacccattggatttcttcacaaactgtggaaagattcgcttctactgttgggatactgccggacaagagaagtttggtggcctcaggg

SEQ ID NO: 293999 - DNA, 236 bp, Glycine max
  unsure (1)..(236): unsure at all n locations
atggcacttcgttgcttggtgatgncccctttctgttctctacactcttggtcttgcgagancaaagccatgccagagacgaagatttttggcatgctgtttggccaaacactcccattccaagttcattgcgagatcttctaaagcctggccctgcaagtgttgaaatcgatgatcaccctatgcaaattgaagaaacacagtacccgaaaaccttcttctataaagaagacctt

SEQ ID NO: 294000 - DNA, 255 bp, Glycine max
  unsure (1)..(255): unsure at all n locations
gtcctctcgaagctttcatcgttcaacatattctcaccatctcagtcatgggcctgctatcttgttttaggtctaccgtcctgagaaaatgttccaaaggaagctctggcatgtcaagattcctgtatacgaacaattttcaacgaaacttgatttcgtctggtggcaatgaatcgtattatnggtattttaacaggagatcatacacttcactttatatgggaactggaactgtgggtgggattacaagtgcta

SEQ ID NO: 294001 - DNA, 257 bp, Glycine max
  unsure (1)..(257): unsure at all n locations
gaggctgnncgaaagaggaaggggaagtggtagccatgactggngatggtgttaatgntgctcctgccttgaagcttgcagacattggtattgcaatnnggcattgcaggcacagacntngcaaaggaagcttcagatatggtgttggcagatgataattttagttcanttgttgctgctgttggtgagggtagatctatctacaataatatgaaggccttatcaggtatatgatctcttccaatattggcgaggtt

SEQ ID NO: 294002 - DNA, 258 bp, Glycine max
gcttccaaggctgcacttctcttgtgtctcaatgttctctttttcactgtggttagttccacatatgtgccatgtaatccaccccccaaaactcccaaacacccacctgtcccaaagccaccatccccaaagctagcaagctgccccaaagacactattaagttcggtgtgtgtgctgatgtgttaggtttgattaatgtgcaattgggaagccaccaaagaccccatgctgcaacctaattcagggtcttgctgatc

SEQ ID NO: 294003 - DNA, 256 bp, Glycine max
  unsure (1)..(256): unsure at all n locations
aaagcccaccatgaaaatcggtcgccctcggcgtccgaattgtagtctggagangcgtcctcagtggcggaccgggcccaagtcccctggaagggggcgccagatagggtgaganccccgtcgtgcccggaccctgtcgcaccacgaggcgctgtncggcgagtcgggttgtttgggaatgcagccccaatcgggcggtaaattccgtccaaggctaaatactggcgagaaaccgaatcagcaccagtggaggaag

SEQ ID NO: 294004 - DNA, 251 bp, Glycine max
tccggtcactcctctcgccggcgatcccttattcctccgtcctccgtcgagtcctttccgattcgaatcgttcccagccttgtgccaccatgaatcccgaatacgattatttgttcaagcttttgctgattggagattctggtgtaggcaagtcatgtcttctcctgaggtttgctgatgattcataccttgacagctatatcagtaccattggagtggactttaaaatccgcatgtggagcaggatggga

SEQ ID NO: 294005 - DNA, 251 bp, Glycine max
tttcaccagtaccaggttgttgggagggctcttcccactgaaactgatgtgcatcctaagatctacaggatgaagctgtgggccaccaatgaggtccgtgccaaatccaagttctggtatttcttgagaaagctaaagaaggtcaagaaaagcaatggccaaatgctagccatcaatgagatttttgagaaaaatcctaccaagatcaagaattatggaatttggctgcgatatcagagccgaactggtta

SEQ ID NO: 294006 - DNA, 253 bp, Glycine max
tcgttttaaattgttaattccaaaagaaacttgcagcattgcgttctctttttctggagtcaggtgtcctggtcgtgatgaaccatattcagacgaagcaattgctctgatgaggagaaagataatgcaaagagatgttgagatagaggttgaaaccgttgatagaactggaacgttcttgggatccttatgggagtcgaggaccaatgtggcaattacactgcttgaagctggtcttgcaaaacttcataca

SEQ ID NO: 294007 - DNA, 255 bp, Glycine max
  unsure (1)..(255): unsure at all n locations
ctagatttaaggaagatgggtaaggaaaaggttcacatcagtattgnggtcattggccatgtcgactctgggaaatccactaccactggtcacctgatttacaagcttggaggcattgacaagcgtgttattgagaggtttganaaggaagctgctgagatgaacaagaggtctttcaagtatgcctgggtgctggacaaacttaaggctgagcgtgaaagaggaatcaccattgatattgctttgtggaagttt

SEQ ID NO: 294008 - DNA, 259 bp, Glycine max
  unsure (1)..(259): unsure at all n locations
gccgttcctcccgtcgacgaaatcggactaccttcaaggcagcttcggcggcgacgccaccgcctccgacgaggacgacctnctacagccgcctgaaatccctccagcnccagtggagttcatcgacatccaggaggagtacgtgaaggatgagcagaagaatctcaagcgcgagctgctccgagcgcaggaggaggtgaagcggatacagtcggtgccgctcgtcattggccagttcatggagatggttgaccagaac

SEQ ID NO: 294009 - DNA, 253 bp, Glycine max
  unsure (1)..(253): unsure at all n locations
gccacagggagcatggtttcnagatggtgggtttgagactgctggagaaggagttgttatagggttcgttgacaccggcatagatccaacacatcctagttttgatgataacaaatatgaaaagccgtatcccgttcctgctcatttttctggcatctgtgaggttactcgcgactttccatctggttcttgcaataggaagcttgttggggcccgtcattttgcagcttctgccataaccagaggaatattt

SEQ ID NO: 294010 - DNA, 251 bp, Glycine max
agctgctctcataagattgcacttccatgattgttttgtcaatggttgtgatggatcagtgcttgtggactcaacaccagggaatcaagctgaaaaggacgctattccaaatcttacactccgaggctttggcttcattgaagcaataaagaggcttgttgaagctgaatgccctggtgtagtctcttgtgctgatatcttggctttgactgccagagactctattcatgccactggtggaccctattgga

SEQ ID NO: 294011 - DNA, 252 bp, Glycine max
acttgggcttcatcaaaccaccattgaatgaagaagaaggtcttgtcttttctcagcttttgaatctatctagattcccaaaagtatatgtgaaatttagttctctttttcaagtgtcaagagagaagtttccttatctggatttggctcctcttttgtcccaagttgtcgctagctttggtgctaaccgtgttatgtggggcagtgattttccatatgctgctgctgaatgtggctacaaagcagccaaag

SEQ ID NO: 294012 - DNA, 252 bp, Glycine max
gaaattttaaaaatgactgggataaacttaagaattcaattattgaaattgaataagtaaacaatttaattggattggtcgaatggtatcaaaaaaatggagtactaactcccatttcttatttattattgaattaaccgatcaacttgctttgttatcgaacatttctttttgatttcaaaaattttccggaaaaaatttgaatctatttttatatgcgaatcaatcctactacttctggtcctgaggttt

SEQ ID NO: 294013 - DNA, 272 bp, Glycine max
acttgatctcatcataatcgtcagcgtcaattgaagaagatgccgatcagaaacatcgccgtcggaaggcctgaagaggcgactcaccccgacacgttgaaggcggctttggctgagttcatctcaaccttcatcttcgtgttcgccggctcaggctccggcatcgcctacaacaagctcaccgacaacggcgctgccacccctgccggcctcatctccgcctccatcgcccatgcattcgccctcttcgtcccgtctccgtcggcgccaac

SEQ ID NO: 294014 - DNA, 275 bp, Glycine max
  unsure (1)..(275): unsure at all n locations
cgcgggtaaacggcgngagtaactatgantctcttaaggnanccanatgcnttcgnacatctaattagtgacgcgcatgaatggantaacgagattcccactgtccctgtctactatccagcgaaaccacagccaagggaacgggcttgggcggaatcagcggggaaagaagaccctgttgagcttgactctagtccgactttgtgaaatgacttgagaggtgtaggataagtgggagctggaaacagcgaaagtaaataccactacttttnacg

SEQ ID NO: 294015 - DNA, 267 bp, Glycine max
gagagtgtgaatctgtttggtattaacaactatactgagtgcagcaccatccactgaggaagaaacattcaaaaggcccaagcatagcaccgagccaaaggtttccaaagttcttacacgaacagatgcatctgataccggcttatatgtgagggacggatatcagtggagaaaatatggtcaaaaagtcaccagagataacccttctcctagggcttacttcaagtgttcatatgccccaagctgccagtgaagaagaaggtgcaa

SEQ ID NO: 294016 - DNA, 268 bp, Glycine max
  unsure (1)..(268): unsure at all n locations
aaccacctccgaatccgacgacctctgtccacacaacatacgatnanaggatatgnnagaacttcncttcccaggtttaagatgccggaggantcgataccaaaggaggcagcgtatcaaataataaacgatgagttgatgttggatgggaacccaannatgaacttggcatcatttgtgacaacctggatggagccagagtgtgataaactcatcatggctgccataataagaactatgttgacatgggagtatcctgtcaccactg

SEQ ID NO: 294017 - DNA, 266 bp, Glycine max
  unsure (1)..(266): unsure at all n locations
ttcatctatggctacccttattgctcccagtcaaccnctctccncaagaanacnntnangctctcagaaaggcttttgaaggatgggggactgatgagaaaactgtcatagtaatattgggtcatagaactgtttatcagaggcagcaaatcagaagagtctatgaggaaattttccagnnggatcttgtgaaacgcctagagtctgagatcaaaggagactttgagaaagccgtgtaccgatggatatagaacctgcagatcgtg

SEQ ID NO: 294018 - DNA, 145 bp, Glycine max
  unsure (1)..(145): unsure at all n locations
gtntatcgnnagnagaatatgaagttgtttgttttctttgttgctgcagtagttttggtancatggccatgccatggcgcaggctaccaaaggttccctctccgaatgaaaactggctatggtgagcgttcttcggaggtaaaat

SEQ ID NO: 294019 - DNA, 273 bp, Glycine max
  unsure (1)..(273): unsure at all n locations
aatannacttagccatatctttanttngcanaacttgctctacaatgngtttccttcgttcttttgcaagaaacaaggatatatcaaaagtaggncgcagaggtatccattgcatgcagaaactatgtgcngaaaaaatatctccttattcactagagaaggcccaaaatcgtgtgatagatgcngcactcanacttgttcgagaaaatacaaggcttaaggacagaactcgtgnatagtttgggaggtgctgtgcnacttcaactctcttgg

SEQ ID NO: 294020 - DNA, 267 bp, Glycine max
  unsure (1)..(267): unsure at all n locations
agctcgctgtnatncgcancggcaaacaaacagtnagccatggccgtcggaaagaacaagcgcatctccaaagggnaaaagggtggcaagaagaaggcagctgatccctttgccaagaaggattggtatgacattaaggccccttctctttttcaagtgaaaaatgttggcaaaaccctcgtctctcgtacgcagggtaccaagattgcttctgaaggacttaaacatagagtgtttgaggtctccttgctgatcttcaaggggatg

SEQ ID NO: 294021 - DNA, 271 bp, Glycine max
  unsure (1)..(271): unsure at all n locations
gcttccntgtgtgccatcgnaagctgatagtatagagggantatatgacactttnaaggagtgtgncagtccattagccaaatcagntggaggaattggtgttagtgttcacaacattcgtgccacaggaatttacatccgtgggcaacanatgggacatcanatggnattgtnccaatgctgcgtgtgttcaacgatactggctcgccatgttgatcaagggggaggcaagaggnaaggtgcattgctgtgtcntggagncatggcatgc

SEQ ID NO: 294022 - DNA, 260 bp, Glycine max
tgaaaatgggttcttctttgtggactttgtgtctaattttgggcttcactagcctcttctgcattctgtgcctttccacggaggccagtggatgttccattcggcagaaactacgttcccacttgggcttttgatcacatcaaatacttcaatggaggttctgagattcaacttcatcttgacaagtacactggtactggcttccagtccaaagggtcatacttgtttggtcattcagcagaacataaagatggttcctg

SEQ ID NO: 294023 - DNA, 260 bp, Glycine max
ctggtggtaccatgcgggactcatttctagtaaatggtgttgccttcaaaaagacattttcatatgctgggtttgagcaacaacccaagaagtttctcaatccaaaaatactattactaaatgttgagttggagctaaaatctgagaaagaaaatgctgaaataaggttatcagatcctgcgcaatatcagtcaatagttgatgcagaatggaatattatttatgacaagttggataaatggtcagcagtggtgccaaag

SEQ ID NO: 294024 - DNA, 262 bp, Glycine max
  unsure (1)..(262): unsure at all n locations
gcaacttccaacaccatagtgaaanngcttccaaggctgcacttctcttgtgtttcaatgttctcttcttcaccgtggttagctccacatatgtgccatgcaacccaccccccanaactccaaaacacccacctgtcccaaagccaccttccccaaagcaagcaagttgccccaaagacactatcaagtttggtgtgtgtgctgatgtgttaggtttgatcaacgtgcaacttgggaagccacaaagaccccatgctgcaac

SEQ ID NO: 294025 - DNA, 263 bp, Glycine max
gttcaagctctgcaaggttaggtcagtacagtttgggccagaaaggtatcccatacctgaacacctatgatggtcgcaccatccgttacccagaccctctcatcagggccaatgacactgttaagctggatctggaggaaaacaagattgtcgattttatcaaatttgatgttgggaatgtagttatggtaacaggccgaagaaacagggggcgtgttggagtgatcaagaacagggagaagcaaagggtagcttcgagacaa

SEQ ID NO: 294026 - DNA, 270 bp, Glycine max
  unsure (1)..(270): unsure at all n locations
gtgcctcacaccgccggcaggtactcggtgaaacggttcangaaggcgcaatgccccattgttgagaggctgaccaactctctcatgatgcacggtagaaacaatggcaagaaactcttggctgttaggatcatcaaacatgctatggagattattcatttgttgactgaccagaaccccattcaggttattgttgaagctgttgtcaacagtggtccacgtgaagatgcaacaagaattggttcagctgagttgttaggagacaggctg

SEQ ID NO: 294027 - DNA, 264 bp, Glycine max
  unsure (1)..(264): unsure at all n locations
ganaatgggtnnntntnngtngactnngtgnctaatnttgggcttcactagcctcttctgcattctgtgcctttccacggaggccagtggatgttccattcggcagaaactacgttcccacttgggcttttgatcacatcaaatacttcaatggaggttctgagattcaacttcatcttgacaagtacactggtactggcttccagtccaaagggtcatacttgtttggtcacttcagcatgaaataaagatggttcctggcga

SEQ ID NO: 294028 - DNA, 259 bp, Glycine max
  unsure (1)..(259): unsure at all n locations
cttgctaccaacactgagcttaaccgagcttcgcaaagatgaatcnggaaaagttaatgaagatggccggttcggttagaactggaggaaagggtactgtgagaagaaagaagaaggctgtccacaagacaacaaccacagatgacaaaaggcttcagagcaccctgaagagaataggggtgaatgccatccctgctattgaagaggtcaatatctttaaggatgacgtattatccagttctaaatcccaaagttcaag

SEQ ID NO: 294029 - DNA, 260 bp, Glycine max
  unsure (1)..(260): unsure at all n locations
agggcctgcatttgcacctcctttcattagggaaggtatttggtgtggtagcgcaaactccacaactgaagaaggaaaggatttnaaggacttgcgaatcatggttgatgttggtgatatccctattcaagaaatgcgagattgtgggataggagatgagagactcatgaaagttgttagtgattctgtcaagctagtgatggaagaggatccattacgtcccttaattttgggtggtgacactcaatctcatatccagt

SEQ ID NO: 294030 - DNA, 262 bp, Glycine max
  unsure (1)..(262): unsure at all n locations
cntgaggngaatangaagtngtnngnntncnnngttgctgcagtagttttggtagcatggccatgccatggcgcaggctaccaaaggttccctctccgaatgaaaactggctatggtgagcgttcttcggaggtaaaatgcgcaagttttaggcttgctgtggaagcacacaacatccgagctattnnaaccattcctgaagagtgcgttgaaccaacaaaggactacatnaaatgggcgaacaattagtcagatctaaaac

SEQ ID NO: 294031 - DNA, 260 bp, Glycine max
  unsure (1)..(260): unsure at all n locations
ctccaaccttagtttcaattctaaacttgttcaccctttattctctcctcttccaaacatcaancatgnaactcaataataaccttggtgacatccaccttgctctttctttctttcactttgtcatgtgctattgacacctccaccatcaccaactacaccgacaatgaggtcatgaccatgtacgaggagtggttggtgaagcaccaaaaggtgtacaatgggttgagagagaaggacagaggttccaagttttcaaa

SEQ ID NO: 294032 - DNA, 255 bp, Glycine max
atttctctctgtttccttcttcaccgcatcaatggagttggacggcgttctcctcggcatgtgcaaccctctcctcgacatctctgccgtcttcgacgacgctttcttgcaaaaatacggtatcaagttgaacgatgcgattctcgctgaggataagcacaaacctatgtatgaagaattggctaacaatcctaatgtggagtacattgctggaggtgctactcagaattcaatcaggttgctcagtggatgctt

SEQ ID NO: 294033 - DNA, 255 bp, Glycine max
  unsure (1)..(255): unsure at all n locations
ctcnnccgtngtgttttactntatggacccccnggcactggcaaaacaatgcttgccaaagctgttgcgaatgcataccactgctgctttcatcagggttgtnggatctgagtttgtgcagaagtatcttggtgagggtccacgaatggtccgtgatgtatttcgtcttgctaaagagaatgcccctgcaattatatttattgatgaggttgatgcaatagccactgctagatttgagcccaaactggagctgat

SEQ ID NO: 294034 - DNA, 256 bp, Glycine max
  unsure (1)..(256): unsure at all n locations
tgagctataagctagtttatcgtgaggagaatatgaagttgtttgttttctttgttgctgcagtagttttggtagcatggccatgccatggcgcaggctaccaaaggttccctctccgaatgaaaactggctatggtgagcgttcttcggaggtaaaatgcgcaagttttaggcttgctgtggaagcacacaacatccgagccttaaaaccattcctgaagagtgcgttgaaccaacaangactacattaatggcg

SEQ ID NO: 294035 - DNA, 250 bp, Glycine max
  unsure (1)..(250): unsure at all n locations
cgaggagcagcctcaggaggagaaggatgtctcacaggaagttcgagcacccaangcacggttcactgggatttcttcccaggaagcgtgctgctcgtcacaggggaaaagtgaaggcattccccaaggatgacccatccaaggcacccaagctcactgcattcttgggttacaaggccggtatgactcacattgttagagaggtcgagaagccaggatcaaagcttcacagaaggaaacttgtgagcct

SEQ ID NO: 294036 - DNA, 259 bp, Glycine max
  unsure (1)..(259): unsure at all n locations
ctagttgttggtctttatatttagttattgacatcaacaaagtcatngaggaagttaatgtggttcaaaccaagaatggaactgtttcagtagcttctgcgtttgctggccataaggaagctatacagcaaagggaccacaaatttttaagaattgctgttgaagaagcgtataaaggggtagactgtgaagatgggggtccctttggtgctattatagtttgtaatgatgaaattgttctagatgtcacaacatggtt

SEQ ID NO: 294037 - DNA, 270 bp, Glycine max
  unsure (1)..(270): unsure at all n locations
ggcacttcgttgcttggtgatgtccctttctgttctcttcactcttggtcttgncgaganaaagccatgccaganacgaagatttttggcatgctgtttggccaaacactcccattccaagttcattgcgagatcttctaaagcctggccctgcaagtgttgaaatcgatgatcaccctatgcaaattgaagaaacacagtacccgaaaaccttcttctataaagaagaccttcatccaggcaaaacaatgaaagtacaattcagcaagc

SEQ ID NO: 294038 - DNA, 267 bp, Glycine max
ctaacaatgacggatgcagctgaagacgctacacgacgccgtaatgcggtggccgagtaccgcaagaaacttcttcaacacaaggaattggaactccagagtacgatccgtcagagaaaatttgcgtgcctcgaagaaagagttcaacaaaactgaagatgatttgaagtctcttcaaagcgttggacagatcattggcgaagttcttaggcctctcgacaatgaacgcttgattgttaaggcaagcagcggacctaggtatgtggt

SEQ ID NO: 294039 - DNA, 263 bp, Glycine max
gtggagatgcaccatgaatctcttacagaggcacatcctggtgacaatgtgggattcaatgttaagaatgttgctgttaaggatttgaagcgtggttatgttgcctcaaactcaaaggatgaccctgcaaaggaggctgctaacttcacagcccaagtcatcatcatgaaccaccctggtcagattggaaatggctatgcccctgtcctcgactgccacacttctcacattgctgtcaagtttgctgaactcatgaccaagat

SEQ ID NO: 294040 - DNA, 260 bp, Glycine max
  unsure (1)..(260): unsure at all n locations
ctcnagcgnaantttcgnagagtanttgaagctgaagganttccntacacttacctatgttntcatggcctttanctggttatttcttacgtaacctggcacagattgacatcactgttcctcctanggacaaggtgttcatacaaggagatggaaatgtgaaaggagcgtatattactgaggctgatgtgggaacttttaccatcgaagcagcaaatgaccctngagccttgaacaaagccgtgcacatnagactccca

SEQ ID NO: 294041 - DNA, 255 bp, Glycine max
cagcagccttcttcgccgtttcagctcaagagccaccagcaggtaagatatggttaagcataacaacgttatccccaatgggcacttcaggaaacactggcaaaactatgtgaagacttggtttaatcaaccagcacggaagaccagaaggcgtttagctcggcagaagaaggctgtcaagattttcccaaggcctactgctggacctctcaggccaattgttcatggccagactctgaaatacaacatgaaagt

SEQ ID NO: 294042 - DNA, 270 bp, Glycine max
ggtcttcctacccaaaacaaaacttcaatttctgtttcagttcgcggagatcaatattttatctaggtccatcgtcgatagaagatacgagaaaccaaaggcaatgtttttgtgggattggttttatgggattctagcgtcgctcgggctgtggcagaaggaggccaagatcttattcttgggcctcgataacgctggcaaaactaccttgcttcacatgctcaaagatgagagattagtccagcatcagcctacccagtatcctacatc

SEQ ID NO: 294043 - DNA, 265 bp, Glycine max
gtttatcttgagcatgatattcaaacaaacacgagccccggcgatcatcaaaagctcttgcttgcatatataagcacacctcgtcatgaaggccccgaggttaatagagaaattgctcagaaggatgcaaaggctctttacaaagcaggggagaagaaactgggaactgatgaaaagacttttatccacatattcagtgaacggagtgcggcacatttggctgccgtcagttcttattaccatgacatgtatggccattcactga

SEQ ID NO: 294044 - DNA, 256 bp, Glycine max
  unsure (1)..(256): unsure at all n locations
ccagttttgaatatatttttattccttctttgtttcttcactttcttccatacacataaccatntgctctcagactgttgtcctcaaagttggtatgtcatgtcaagggtgtgctggagcagtgaacagggttttgggaaaaatggaaggtgttgagtcatttgacattgatctgaaggagcagaaggtgacagtgaaaggaaatgtggagccagntgaagttctgcaagccgtttccaaatctgggaagaagact

SEQ ID NO: 294045 - DNA, 246 bp, Glycine max
  unsure (1)..(246): unsure at all n locations
gcaggcaatggtgtacgtcaaggctcagaaatcaaaagcctactttcaaganatatcaagtcaagttcaagagaagaagagagggaaaaaccgattaccgtgccaggattcggttgattaatcaggacaagaacaaatataacactccgaaataccgatttgttgttcgctttagcaacaaggacattgttgcacaaataatatctgctagcattgctggcgatattgttcttgctgcagcatatg

SEQ ID NO: 294046 - DNA, 265 bp, Glycine max
aaccttctttcttcttatatatcgaacatggctaagtatcattcaagtgggaaaagctcttccatgactgctatagccttcctgtttatccttctaatcacttatacaggcacaacagatgcacaatccggggtatgttatggaagacttggcaacaacttaccaacccctcaagaagttgtggccctctacaatcaagccaacattcgcaggatgcgaatctacggtccaagcccagaagtcctcgaagcactaagaggttcca

SEQ ID NO: 294047 - DNA, 257 bp, Glycine max
  unsure (1)..(257): unsure at all n locations
cagcttcaatcctcgaccacaccacccatcagcgacatgcttcctctttcccttctcaagactgcccaaggccaccctatgttggtggaactgaaaaatggggagacatataacgggcatttggttaattgcgatacatggatgaacatccatctccgagaagtcatttgtacatctaaagacggagatagattttggaggatgcctgaatgctatatacgaggcaatncnnncaagtaccttcgagttcctgatga

SEQ ID NO: 294048 - DNA, 254 bp, Glycine max
tctctctctagacttagattttgtgaatggctgaagtggaagagggacaggtcatcggcgtccacaccgttgatgagtggaagctgcaactccagaatgcaaaagactccaaaaaactgattgtggtggattttactgcttcctggtgtggtccatgccgttttatggccccagttcttgcagagattgcaaagaaaactcctgaattgatcttcctcaaagtggatgtggatgaagtgaggcctgttgctgag

SEQ ID NO: 294049 - DNA, 254 bp, Glycine max
  unsure (1)..(254): unsure at all n locations
gggatcacagaaaccaacaacagttcttgcactgaggtttcacgatgttgctggaacttgcacttggtttgtttgtgttagctttgtttctgcacttgcgtcccacaccaagtgcaaaaancaaaagcacttcgccacctcccaaaccctccaagcccaaagcctcgtcttcccttcattggccaccttcacctcttaaaagataaacttctccantatgcactcatcgatctctccaaaaagcatggcccctt

SEQ ID NO: 294050 - DNA, 251 bp, Glycine max
  unsure (1)..(251): unsure at all n locations
ctgaagacnttggtgctttgcatctaatcccaaaggaantttncacttcaagattgttagacnagattgaagctggggaaaggtttgctgtgtatgttgtagtcccaatgtggccagagggtgttccagaaagtgcatcagttcaggcaatattggactggcagaaganaacaatggagatgatgtacaaggacattattcaggcactcagagctaagggaatcgatgaagatcctcgacactatttgaca

SEQ ID NO: 294051 - DNA, 250 bp, Glycine max
  unsure (1)..(250): unsure at all n locations
ggantcgatcaatccctcanctcattgctgagatctgcaaactggctntggantacgaaccctacgacagtagcggaactgntgatgaccttccaccaacccatcaanntnccgantttccaggggaggaggctgaagttacaagcttggaggtattgacaagcgtgtgattgagaggttcgagaaggaggctgccgagatgaacaagaggtcattcaagtatgcctgggtgctcgacaagctcaaagct

SEQ ID NO: 294052 - DNA, 250 bp, Glycine max
  unsure (1)..(250): unsure at all n locations
gctggcgttgttgccgttgaggtcaccggtggacctgaagttcccttccatcctggaagagaggacaaacctgagccaccaccagagggtcgcttgcccgatgccactaagggttctgaccatttgagagatgtgtttggcaaagctatggggcttagtgaccgagatatcgttgctctgtctgggggtcacactattggagctgcgcacaaggnncnnnctggattcgagggtccctggactctaatcc

SEQ ID NO: 294053 - DNA, 247 bp, Glycine max
ggcaagaagaagtttgagactctttcctacctgccagaccttgatgatgcacaattggcaaaggaagtagaataccttcttaggaagggatggattccttgcttggaattcgagttggagcacggtttcgtgtaccgtgagcacaacaggtcaccaggatactacgatggacgctactggaccatgtggaagctgcctatgtttggttgcactgatgcttctcaggtgttgaaggagcttcaagagg

SEQ ID NO: 294054 - DNA, 247 bp, Glycine max
  unsure (1)..(247): unsure at all n locations
ggcgtcttcataaacgcctttcttctccgtttccgtttcctcgttcgaattcgctttttgatctgcgaaaatgagagagtgcatctcgatccacattggtcaggctgntatccaggtcggaaatgcttgctgggagctctactgcctcgagcacggcatcgggcccgatgggcaaatgccaagtgacaagacagttggcggtggtgatgatgctttcaatactttcttcagcgagactggtgctgga

SEQ ID NO: 294055 - DNA, 239 bp, Glycine max
caacagcgtcctctccacccactccctcctggaacacaccgacgtggcggtcctcttggacaacgaagccatctacgacatctgcaggagatccctcgacatcgagagaccaacctacaccaacctcaacaggctcatttcccagatcatttcgtccctcaccacttccttgaggttcgatggtgccatcaatgtggatatcactgagttccagaccaaccttgtgccctaccctagga

SEQ ID NO: 294056 - DNA, 247 bp, Glycine max
  unsure (1)..(247): unsure at all n locations
ctagaacttgattacttgaacattccctatgacagatgaggncggttgttctggatttctggccaagtccatttgggatgagggtcantactgcanttgctgaaaagggtatcgaatatgagtacngagaagaggacttgaggaacaagagtcctcttctcttacaaatgaacccggttgacaagaagattccggttctcatccanaatggcaaacccatttccgaancctcattgctgttcagtac

SEQ ID NO: 294057 - DNA, 244 bp, Glycine max
  unsure (1)..(244): unsure at all n locations
gttttcttngttgntgcagtagttttggtagcatggccatgccatggcgcaggctaccaaaggttccctctccgaatgaaaactggctatggtgagcgttcttnngaggtaaaatgcgcaagttttaggcttgctgtggaagcacacaacatacgancnganngaagcattcatnaagagtgngtnnaaccaanaaangactannttaatggcgannaatttagatcagactctaaaacagtta

SEQ ID NO: 294058 - DNA, 247 bp, Glycine max
ggtgaattggttggagagatatccagaatataaggacagagatttctatattgctggggaaagctatgctgggcattatgtgcctcaacttgcacataccattctctatcataacaaaaaggcaaataagaaaatcatcaacctcaaaggaatcttgattgggaatgcagtgatcaacgaggaaactgactcggacggactgtatgattatcttgctagccatgcaatcatctcagacaaagcagct

SEQ ID NO: 294059 - DNA, 246 bp, Glycine max
  unsure (1)..(246): unsure at all n locations
ggaacaagcaagtgcttctaaaggactatgttaccggttttcccaaagaatccgacatgaatattgtcgaaagtaccataacattgaagcttccacaaggttncaangangacttgctcaaaaatttgtacttgtcttgtgatccgtatatgaggaatctcatgaacaagcccgaaggccctcccaatagtcgtgcttacatcctggctctccattaataggatatggtgtgtctaaagtcctgga

SEQ ID NO: 294060 - DNA, 247 bp, Glycine max
  unsure (1)..(247): unsure at all n locations
ctagaacttgattacttgaacattccctatgacagatgaggnggttcttctggatttctggccaagtccatttgggatgagggtcanncttgcacttgctgaaaagggtatcgaatatgagtacaaagaagaggacttgaggaacaagagtcctcttctcttacaaatgaacccggttcacaagaagattccggttctcatccacaatggcaaacccatttccgaatccctcattgctgttcagtac

SEQ ID NO: 294061 - DNA, 248 bp, Glycine max
  unsure (1)..(248): unsure at all n locations
gccttaccttancctcgcancngnagnnaccggcanaggaaaaactagnaaagatcccaacantgagganccgagcgattttntctaccntccnaganatgnagcatttgggtccacttgaagtccatcagatnttctgcgctatggaatcaaatctgtatcccaagatgtcttgcctgtcttgnctgatgcattcgatggaaatatnttgagccttgagnttgntaattttgctgaagtgcacnaat

SEQ ID NO: 294062 - DNA, 246 bp, Glycine max
  unsure (1)..(246): unsure at all n locations
cccttcctgtacaagttcttgcatcgacctggactggaatgcnttgattncagtgtaataatcttgttgtgagtatgaaaagtcacgggatctgcgtgtagtgaagaaagtgtttgatgcttgagaaatgatgactataatctctatctttgtactttttagtggggtacctgtatacattacagtggttttaaaattttaatgctatgttataatggttggcatatttatcaaaagtttgcttat

SEQ ID NO: 294063 - DNA, 241 bp, Glycine max
ctttctttttctgtgagcctttctttcaggttcttaacttgatcagtgtgcagtgtccaaatcataagggtagttgcaaattgcaatggctaagcatgatgttgagggtggttccttctctgcaaaggactaccatgatcctcctccagcaccgttgattgatgctgaggaactcacacagtggtccttctacagggctttgattgctgagttcattgccacaatgctcttcctttacatc

SEQ ID NO: 294064 - DNA, 239 bp, Glycine max
  unsure (1)..(239): unsure at all n locations
cttagacaaaaaacaaggatcanaaccgttgaatcaagttgannaagatggcactagtctctggaggaagatcaacactnaaccctaacgcccctctttacattcctgccgcgtttcgccaagtggaggatttctctccggaatggtggcagntggtgacgacgntgacatggtaccatgactactggctaagccagcagcacgatgagggagnttctacggngaggacgacgggtttg

SEQ ID NO: 294065 - DNA, 244 bp, Glycine max
  unsure (1)..(244): unsure at all n locations
atcgaccatgcttncgccntcntgcgtcgccgtctnacgtcggcgccaacatctccggnggncacgtgaaccccgccgtgcacctgtcggngnccttcntgggcggcaacatcaccttactccgcggcatcgtctacgtcatcgcccagctcctcggntccatcgtggcctccctcctcctcgccttcgtcactgcctcccctgttccagcattcgggctttccgctggagtcggagttggcaa

SEQ ID NO: 294066 - DNA, 243 bp, Glycine max
  unsure (1)..(243): unsure at all n locations
aaatcctcaattttctgagcagccaaacactctctctctgtctctcgaaaattctcagtttgcagagaaaatctgaatcatgtcgtggcaagcgtatgtcgacgatcaccttctgtgtgacatcgaaggtaaccacctcactcacgctgctatcatcggccaagacggnagcgtttgggctcagagtaccgacttccctcagttcaaacctgaggagataactgccatcatgaatgactttaa

SEQ ID NO: 294067 - DNA, 238 bp, Glycine max
  unsure (1)..(238): unsure at all n locations
tttgacgagaccggaaaattgggcattagttgaaaaggccaagtatttctacatttctggctttttcctcactgtatctcctgattccatacaattagttgctacnacatgcagctgcaaataacaagttcttcatgatgaacctttctgccccatttatctgtgngttcttcaaggatgcactgaataaagttctgccatatatggactacgtttttggtaatgagactgaagcaag

SEQ ID NO: 294068 - DNA, 249 bp, Glycine max
cgacttacaaatattttgaggtcaactctggtggatgttgcacacagcgctgttagaaatgatccaagaatcaactggctctgcaacccagtccataaacacagggaactgcgtggcctcacttctgctgggaaaagtaacaggggtttacggggcagaggacatctctaccacaaaaatcgtccatcccgcaggcaacctggaagagaaacaacactctttcccttcgtcgctaccgttgattttgtt

SEQ ID NO: 294069 - DNA, 263 bp, Glycine max
  unsure (1)..(263): unsure at all n locations
aattgctccttcgatgctctcttccgacttcgccaatttggcttccgaggctcagcgcatgctccacttcggcgccgattggctccacatggacatcatggatgggcattttgtccccaatttaactattngcgctccagttattgaaagtttgagaaagcacacaaagggatatttggnttgtcaccttatggttacaaatcctcttgattatgttgagcccttggcaaaagctggtgcttctggttttacatttcatgtag

SEQ ID NO: 294070 - DNA, 263 bp, Glycine max
  unsure (1)..(263): unsure at all n locations
attccccatctcctcaccttattcagccactgctaatttctagggttccgaaatggacgctggcggaaagatcaagaagggcgccggaggaagaaagggcggcggccctaagaagaanccggtttcaaggtccgtcaaggccggtctccaattccccgtcggaagaattgggccgttatttgaagaaangaaggtacgcccagcgtntcggtaccggtgctcccgtttacntggccgcagttctcgagtacctagctgctgag

SEQ ID NO: 294071 - DNA, 268 bp, Glycine max
  unsure (1)..(268): unsure at all n locations
tgaaaatgnaggtccttgttttcttcgttgctanaattttngtagcntggcaatgccatgcgtagcgatntgttcccctctccgantgagacactgggctatggtgnccgtantccggagttgaaatgcgcaagttggangcttgctgtggaagcacacaacatctttggntttgaganccattcctgaagagtgcgttgaagcaacaaaggantacatccatggcnaacaatatagatcagactccaaaacagttaaccnacaagct

SEQ ID NO: 294072 - DNA, 263 bp, Glycine max
gggaaatatggcatttgcaggaacaactcagaagtgcatggcttgtgacaaaacagtttatctggttgataagttgacagcagataaccgagtgtaccataaggcttgcttcagatgccaccactgcaaaggaacactcaagcttagcaactataactcttttgagggggttctttactgcaggccacacttcgaccaactgttcaaaagaactggtagtcttgacaaaagcttcgaagggacaccaaaaattgctaaaccag

SEQ ID NO: 294073 - DNA, 258 bp, Glycine max
  unsure (1)..(258): unsure at all n locations
gtctacttgtgtcccccagaagccttaaagctcttctctgctttgaaaatggctgattggggcccggtggtgatcgcagtggtgctgttcgtgctgttaagcccngggcttctgtttcagatgccagccaggggaagggtagcagagtttgggaacatgcaaaccagtggggcctccattttggttcacgccatcatctactttggcctcatcactatcttcctcattgccattggcgttcacatctacactggctaa

SEQ ID NO: 294074 - DNA, 263 bp, Glycine max
  unsure (1)..(263): unsure at all n locations
gnggtgagtgngtnaganacggaaagnnccaaagccaccgtcttctcttctcagagcttngctttgcttatcgattntctctcctctgcatgctttgctcattcaaggtntgtnatagatggccgatgctgaggatattcaaccccttgtttgttacaatngaactggaatggtcaaggctggatttgctggtgatgatgctcccagggctgtcttcccagtattgttggccgacctcgacacactggtgttatggttgggat

SEQ ID NO: 294075 - DNA, 256 bp, Glycine max
catgggtgagatacataaccacttttctcaataatcttcaaatatcttacctgtatcccagacacagtaaaatatggtatctcaaattttacacgtataggagcttttctctcaggagttgcttcctcatctactatactgggaagatgaaactctgcccttaacatgtactcctttcctccaggaaatgatcttattttccagattaatgcatctttttcaggtgcatatgatgcagatcccattgaagtccgaa

SEQ ID NO: 294076 - DNA, 257 bp, Glycine max
  unsure (1)..(257): unsure at all n locations
ctgccagtagtcatatgcttgtctcaaagattaagccatgcatgtgtaagtatgaactaattcagactgtgaaactgcgaatggctcattaaatcagttatagtttgtttgatggtatctactactcggataaccgtagtaattctagagctaatacgtgcaacaaaccccgacttctggaagggatgcatttattagataacnggtcaacacaggctctgcctgttgctttgatgattcatgataactcgtcggat

SEQ ID NO: 294077 - DNA, 257 bp, Glycine max
  unsure (1)..(257): unsure at all n locations
ttagatacttcatctnctgcaaagancttccagtggtgttgnatgccttcattcacggtgatanaaacttgttcaaggactacccanaattacaggaagctttggtttgggtttactttcactcaaatatttcaaaattcancaaggtagaatgttggggtccactgaaanatgtgtgtgcatactcaagtgggtgccatgaggagggtaagcaaggtgatattccagttagcgacagcacgcatatcaatatgtcg

SEQ ID NO: 294078 - DNA, 255 bp, Glycine max
  unsure (1)..(255): unsure at all n locations
antgtgtgntcaactagcccaatttgatgaagaactttataaggtaactggtgaaggngatgacaaatatctgattgcaacagcagagcagccactctgtgcatttcatttagatgattggattcaccctacccagctaccaataagatatgctggatattcatcatgctttcgtaaagaagctggatctcatggtcgagacactctaggaatattccgagttcaccaatttgagaaagtggagcaattttgcct

SEQ ID NO: 294079 - DNA, 258 bp, Glycine max
  unsure (1)..(258): unsure at all n locations
gagcgatgcatcggagcatctcttctgcgcttgcatttncatgattgtttcgtaaatgggtgtgatggatcaatattgctagatgacacccgaaacttcactggcgagaagactgcattgccaaatcttaattcagtcagaggtttttctgtggttgatgaaatcaaagctgcggtggacaaagcctgcaaacgccatgtggtctcnngggnggattnctgggcnattggancccgnngntnctaagnccnatatagg

SEQ ID NO: 294080 - DNA, 257 bp, Glycine max
atgaaaatgaaggtccttgttttcttcgttgctacaattttggtagcatggcaatgccatgcgtacgatatgttccctctccgaatgaacactggctatggtgcccgtactccggaggtgaaatgcgcaagttggaggcttgctgtggaagcacacaacatctttggctttgagaccattcctgaagagtgcgttgaagcaacaaaggaatacatccatggcgaacaatatagatcagactccaaaacagttaaccc

SEQ ID NO: 294081 - DNA, 236 bp, Glycine max
  unsure (1)..(236): unsure at all n locations
aatttgnnaataattgctccccatngccattgagtttcattgtaggngctaacattttgttgggtggggcnttctntggagcggccatgaaccccgctgtgacatttgggcntgctgtngtgagctgnacctgnaccaaccatggatctantgggcngggcctntcatcggtggtggaatngctggcnttgtnnacgaggttgtttnatcacccacaccacgancanttcccacca

SEQ ID NO: 294082 - DNA, 231 bp, Glycine max
  unsure (1)..(231): unsure at all n locations
ggcacaagtgagtttgttgatcgagataactagaaacagtgtgatgaaaatgaaggtccttgttttcttcgttgctacaattttggtagcatggcaatgccatgcgtacgatatgttccctctccgaatgaacactggctatggtgcccgtactccggaggtgaaatgncgcaagttggnggcttgctgtggaancacaaaatttttgggttnngagacctcncggagggg

SEQ ID NO: 294083 - DNA, 232 bp, Glycine max
taatttgggaattattgctcccatcgccattggtttcattgtccggcgctaacattttgttgggtggggccttctctggagcggccatgaaccccgctgtgacatttgggcctgctgtcgtgagctggacctggaccaaccactggatctactgggccgggcctctcatcggtggtggaatcgctggccttgtttacgaggttgtctttatcagccacacccacgagcagtt

SEQ ID NO: 294084 - DNA, 231 bp, Glycine max
  unsure (1)..(231): unsure at all n locations
gcaggattgtggatgcaataatctcccatggatgtttcctaagagaatgcactgtccaacattccattgtgggtgaacgttcacgtttggattatggtgttgagctccaggacactgtaatgatgggagctgactattaccaaactgaatccgaaattgcttctctgctggcagagggganggttcccatngggattggagggnacaccaaaatngggactgnntntttgg

SEQ ID NO: 294085 - DNA, 231 bp, Glycine max
gacttccgcaatggtgcatgtcgaaatcttgtttgtactgatctttttactagaggaatagacattcaagcagttaatgttgttattaattttgattttccaaagaatgcagagacttatttgcacagggttggtcgttcagggaggtttgggcaccttggtttagcagtgaacttgattacctatgaggatcgctttaattatatgggttgaacaagaacttggaactga

SEQ ID NO: 294086 - DNA, 248 bp, Glycine max
  unsure (1)..(248): unsure at all n locations
gggtgctcgaagaagtcccattcattgcactgatagcagcgatggggatcgatcttaaggctgggggtaagagcaaaaagaccaaaagaacagcaccaaagtccaatgacatctaccttcaaattactcgtcaagctttatcgatttccttgttcgaaggacagacagcaatttcaatggctgtgatactcaagcgcttgttcatggagcaaggttaacaagcctccaatttctttgtcaaggttant

SEQ ID NO: 294087 - DNA, 249 bp, Glycine max
ggccgctctctgagaaaaacagatagtgtgggagagagaagagcggaagagaaaatgacgaccaggttcaagaagaacaggaagaagagaggtcacgtcagcgccggacacggccgtatcggaaagcaccgcaagcatcccggaggtcgcggtaacgccggtggcatgcatcaccaccgtatcctcttcgacaagtaccatcctggttttcttcgggaaggtaggcatgcgctatttccacaaacttcg

SEQ ID NO: 294088 - DNA, 242 bp, Glycine max
aatttcggacaatacccttatggcggtttcatcctaaatcgtccaactctaaccagaagattgctcccagagccaggaaccaaagaatatggtgaacttaccagtaatcatcaaaaggcttatttgagaacaattacaggaaagactgaggcccttgtggacctaacagtgatggagatattgtcaaggcatgcttctgatgaggtctaccttggacagagggacaatccaaattggactgt

SEQ ID NO: 294089 - DNA, 236 bp, Glycine max
tggaatcaagaccgatgctttcttcaaaactaatctttccgatgtatatgctgttggtgatgttgctactttccctttgaaattatacggtgaattgagaagagttgaacatgttgatcattctcgcaaatcagctgaacaggctgtgaaggccatcaaggcagctgaggaaggaagaacagttgaggagtatgattaccttccatacttctattcccgttcattgatctgtcttg

SEQ ID NO: 294090 - DNA, 241 bp, Glycine max
  unsure (1)..(241): unsure at all n locations
gagacaccgacacagatctgtcttccgaagcaggaactaaatatggctgacttgttggaatggtcaaagcaagataagaaacgaatgcttcatgtcgtctaccgtgttggtgaccttgatcgcaccatcaaattttacacagaatgtttaggaatgaagctttgaggcaaagagatatcccagaggagaaatatgctaatgcttttcttggatttngncctgaagaatcccatttgttgtg

SEQ ID NO: 294091 - DNA, 236 bp, Glycine max
  unsure (1)..(236): unsure at all n locations
gacagcgaaacagagagtgatttcagtgagtgatcggtgttcacttgatctcatcataatcgtcagcgtcaattgaagaagatgccgatcagaaacatcgccgtcggaaggcctgaagaggcgactcaccccgacacgttgaaggcggctttggctgaggtcatctcaaccttcatcttcgtgttcgccggctcaagctccggcatcgcctacnacaagctcaccgacaagggcgt

SEQ ID NO: 294092 - DNA, 240 bp, Glycine max
ggcacaagtgagtttgttgatcgagataactagaaacagtgtgatgaaaatgaaggtccttgttttcttcgttgctacaattttggtagcatggcaatgccatgcgtaacgatatgttccctctccgaatgaacactggctatggtgcccgtactccggaggtgaaatgcgcaagttggaggcttgctgtggaagcacacaacatctttggcttgagaccatcctgaagagtgcgttgaa

SEQ ID NO: 294093 - DNA, 128 bp, Glycine max
ggcacaccaacaccaaaacaaacccactaagatggcttcctttgtatccttcctagtgctgcttcttgcagcccttatcctcatgcctcaagggcttgctacttactacaaaccaattaagaagccac

SEQ ID NO: 294094 - DNA, 235 bp, Glycine max
ggttgcgtgtgatgaaccataaccatgtcagacgaggagcaccacttcgagtcaaaggctgatgctggagcatcaaagacatttccccagcaagctggaaccatccgcaaaaacggttacattgtcatcaagaacaggccatgcaaggttgtggaggtttcaacttccaaaactggcaagcatggacacgcaagtgtcactttgttgcattgacatcttcatgggaaaaagcttg

SEQ ID NO: 294095 - DNA, 147 bp, Glycine max
ggcacaagtgagtttgttgatcgagataactagaaacagtgtgatgaaaatgaaggtccttgttttcttcgttgctacaattttggtagcatggcaatgccatgcgtacgatatgttccctctccgaatgaacactggctatggtgc

SEQ ID NO: 294096 - DNA, 221 bp, Glycine max
ggtgctctgctcgtgcctctagggttatcatttctccatttccattttctctctcacttttcaagaatcgtaagctatgggaaagtcttacccaactgtgagtgctgattaccagaaggccgttgagaaggcgaagaagaagctcagaggcttcatcgctgagaagagatgcgctcctctaatgctccgtttggcaggcatctgctggaactttgacaagg

SEQ ID NO: 294097 - DNA, 238 bp, Glycine max
gggagatagcaatctcatctcattcatttcaatggcaactcaaggtcaagtcattacctgcaaagctgcggtggcctgggaacccaacaagcccttaactgtccaagacgttcaggtggctccgcctcaggccggcgaggtccgtgtccaaatcctcttcaaccgctctctgccacaccgatgttacattgggggcggcaaaggatcccgaaggtctcttcccctgtattcttgggca

SEQ ID NO: 294098 - DNA, 231 bp, Glycine max
ggcacaagtgagtttgttgatcgagataactagaaacagtgtgatgaaaatgaaggtccttgttttcttcgttgctacaattttggtagcatggcaatgccatgcgtacgatatgttccctctccgaatgaacactggctatggtgcccgtactccggagtgaaatgcgcaagttggaggcttgctgtggaagcacacaacatctttggctttgagaccattcctgaagag

SEQ ID NO: 294099 - DNA, 241 bp, Glycine max
ggaggaagccacatagagacacaatacagagtgggttgttgctccttcgccacaactctctgccaacatgggtatctccagagattctatgcacaagaggcgtgccactggtggcaagaagaaggcctggaggaaaaagagaaagtatgagcttggtcgccagcctgctaacactaagctgtcaagcaacaagacagtcaggaggatccgtgttagaggtggaaatgtgaaatggagggca

SEQ ID NO: 294100 - DNA, 238 bp, Glycine max
ggcacaagtttgttgagatagctagaagcaataagatgaaaatgaaagtgcttgttttgtttgttgctacagttttggtagcatatgaatgccatggctcagactaccagaagttccctctccaaatgaaaactgggtttggtgggcaatacagcaatgaggtggcatgtgccagttggaggcttggcgtggaagcaaacaacgtagtcaagtggcaaactgttcctgcagcttgcgg

SEQ ID NO: 294101 - DNA, 244 bp, Glycine max
ggggcgaggtagccagagagtgatacaatacagggtgcgttgttgctccttcgccacaactccctgccaacatgggtatctccagagattctatgcacaagaggcgtgccactggtggcaagaagaaggcatggaggaagaagagaaagtatgagcttggtcgccagcctgctaacactaagctgtcaagcaacaagacagtcaggaggatccgggttagaggtggaaatgtgaagtggagggc

SEQ ID NO: 294102 - DNA, 239 bp, Glycine max
ggaagagcatttggctgttaagcacttttctgttgagggtcagctggagtttaaggctgtcctctttatccccaagagggcaccttttgatctctttgacaccaggaagaagcctaacaacatcaaactgtatgtccgccgtgtcttcatcatggacaactgtgaggagttgatgcctgaatatcttagctttgttaagggtattgtggattctgaggatcttcctctcaacatttcta

SEQ ID NO: 294103 - DNA, 238 bp, Glycine max
  unsure (1)..(238): unsure at all n locations
ggcacaagtttgttgagatagctagaagcaataagatgaaaatgaaagtgcttgttttgtttgttgctacagttttggtagcatatgaatgccatggctcagactaccagaagttccctctccaaatgaaaactgggtttggtgggcaatacagcaatnnagtggcatgtgccagttggaggcttggcgtggaagcaaacaacgtagtcaagtggcaaactgttcctgcagcttgcgg

SEQ ID NO: 294104 - DNA, 242 bp, Glycine max
ggcacaagtgagtttgttgatcgagataactagaaacagtgtgatgaaaatgaaggtccttgttttcttcgttgctacaattttggtagcatggcaatgccatgcgtacgatatgttccctctccgaatgaacactggctatggtgcccgtactccggaggtgaaaactgcaagttggaggcttgctgtggaagcacacaacatctttggctttgagaccattcctgaagagtgcgttgaag

SEQ ID NO: 294105 - DNA, 242 bp, Glycine max
ggcagttcaaagcgaaaagagattcgaatccaaggaagggaaaggaaagtaagagaagagaagaatggccgaagagggacaagtgattggtgtccacagcgtggaggagtgggaggaacatctcaagaagggacaagagtccaagaaattgattgtggtggattttactgcttcttggtgcggcccatgccgtttcattgccccaattcttgcggatatggctaaaaagttgccgaatgtca

SEQ ID NO: 294106 - DNA, 236 bp, Glycine max
ggcgtcgctccgcaccagtttcaccgcacgaatatcttgttgtttggagcgatccgagaaaaaccctgtaaacatgttggtttaccaggacctccttacaggtgatgagcttctctctgactccttccgttacaaggaaattgagaatggaatgctgtgggaagttgaggggaagtgggttgttaaaggagcagttgatgtagacattggtgcaaacccttctgctgagggtggag

SEQ ID NO: 294107 - DNA, 235 bp, Glycine max
gggatacatggggacgatttgttgaaaggagtacagcatatcatccatggttatggtctgctggaaatcacgaaatagactatatgccttacatgggagaagttgttcctttcaaaaactatctttaccgatatactactccctacttggcctccaatagctccagtcccctctggtatgcagttaggcgtgcgtctgctcatataattgtgctatccagctattcaccatttgt

SEQ ID NO: 294108 - DNA, 241 bp, Glycine max
  unsure (1)..(241): unsure at all n locations
caagctgagtttttgatccgatctctctcagaaatggctgcggctgccaatcctgtagttgggtcccatatttgggtggaggatcctgatgtggcttggatagatggtgaggtcttggaggttaaaggagaagaaattaaagtcctttgcacttcagggaanncggttgttgttaaagcttccagtatttatcataaagatacagaagtcccaccaagtggagtggatgatatgagaaagc

SEQ ID NO: 294109 - DNA, 239 bp, Glycine max
gaaagcaagaatgattttgacctcggcctcaacgcgctcgattatgaggtctggcttggtgatgttagcattggtggtgcagaactcaccaagtctgctaaaattgaaaaaagtggaattagttatattgatattccaattaccttcaggcctaaggattttggctctgcactatgggacatgattagaggaagaggaactgcttacaccataaaaggacatattgatgttgacactcc

SEQ ID NO: 294110 - DNA, 215 bp, Glycine max
  unsure (1)..(215): unsure at all n locations
gcacaagtgagtttgtngatcgagataactagaaaangtgtgatgaaaatgaaggtccttgttttcttcgttgctacaattttggtagcatggcaatgccatgcgtacgatatgttccctctccgaatgaacactggctatggtgcccgtactccggaggtgaaatgcgcaagttggaggcttgctgtggaagcacacaacatctttggctttga

SEQ ID NO: 294111 - DNA, 233 bp, Glycine max
gacatgcataagaacaagcacaaggtctgattcgtgtttccttacatcaacttgtggtctaaaaatgggaaggatgccatgctgtgagaaggtagggttgaacaaaggaccatggaaaaccgaagaagatgagaagctcgtggcttatgttgaatggcatggccctggaaactggcgttcagtgcctgccaaagcgggtcttcaaagatgtggcaagagttgtagactgaggt

SEQ ID NO: 294112 - DNA, 175 bp, Glycine max
ttgttgtttgtgtgtttgttttttctctcacctgaaaatgtcttgctgcggtggtaactgtggttgcggaagcgcctgcaagtgcggcaacggctgcggaggctgcaagatgtacccagacttgagctacaccgagtcaaccaccaccgagaccttggtcatgggagtggcacca

SEQ ID NO: 294113 - DNA, 238 bp, Glycine max
gggcataagccaacttgagctgaattactactctaaaagctgcccaaaagctgaagagatcatcaaggaacaagtcacataactatataacaagcatggaaacactgccgtttcgtgggtcagaaatctcttccacgattgcgtggttaagtcatgcgatgcatcattactgttagcgacggtgagcgatgtagtgtcggagcagacatcggatagaagttttgggatgagaaacttc

SEQ ID NO: 294114 - DNA, 229 bp, Glycine max
  unsure (1)..(229): unsure at all n locations
gaggaattggtaactttgcagaattgccccaaccctcccaagaagctgaagccagggacctattggtatgataaagtatctggtctttgggggaaggagggacagaagccttcacaaattataagtccgcatctgaatgttggaggctcntccaacaggatgccagcaatggaaacactcaggttttcattaatggtcgggaaataacaaaagtggagcttcgaatgtt

SEQ ID NO: 294115 - DNA, 234 bp, Glycine max
gaacacgcggctgccgccggaggtgaaccgcgtgctgtacgttcggaaccttcccttcaacatcacgagcgaggagatgtacgacatcttcggcaagtacggcgccattcggcagatccgcatcggcaccaacaaggacactcgcggaacggccttcatcgtctacgaggacatctacgacgccaaaaccgccgtcgaccacctctccggcttcaacgtcgccaaccgctacct

SEQ ID NO: 294116 - DNA, 235 bp, Glycine max
ggcacaagtgagtttgttgatcgagataactagaaacagtgtgatgaaaatgaaggtccttgttttcttcgttgctacaattttggtagcatggcaatgccatgcgtacgatatgttccctctccgaatgaacactggctatggtgcccgtacttcggaggtgaaatgcgcaagttggaggcttgctgtggaagcacacaacatctttggctttgagaccattcctgaagagtgc

SEQ ID NO: 294117 - DNA, 232 bp, Glycine max
ggtgtacaagtgagtttgttgatcgagataactagaaacagtgtgatgaaaatgaaggtccttgttttcttcgttgctacaattttggtagcatggcaatgccatgcgtacgatatgttccctctccgaatgaacactggctatggtgcccgtactccggaggtgaaatgcgcaagttggaggcttgctgtggaagcacacaacatctttggctttgagaccattcctgaag

SEQ ID NO: 294118 - DNA, 205 bp, Glycine max
  unsure (1)..(205): unsure at all n locations
ggacaccaacaacaaaacaaacccactaagatngcttccttagtatccttcctagtgctgcttcttgcagcccttatcctcatgcctcaagggcttgctacttactacaaaccaattaagaagccaccagtgtacaagcctccagtgtacaagccaccagtgtacaaaccaccggtttataagccaaaaccaccggtttacaagc

SEQ ID NO: 294119 - DNA, 206 bp, Glycine max
aaagagacccggaaagggtgggaaccgcttttggaaatccattgggcttggatttaagactcccagggaagccatcgaaggaacctacattgacaagaagtgccccttcactggcaatgtttccatccgtggccgtatcttggctggaacatgtcacagtgctaagatgaacaggactattattgttaggaggaattatctccatt

SEQ ID NO: 294120 - DNA, 227 bp, Glycine max
ggaaaagctacaaaatgaacagttcttgtgcggacattcttctctttgctgcccatagatggccaatgtcaaagcctagtcttgtaggtgaatctaaggatgtttttgatcagaaggcaagcaataagtactggattgatgttcagctgcgatggggtgattatgactctcatgatattgagcgttacactcgggccaaatttatggactacacaacagataacatg

SEQ ID NO: 294121 - DNA, 233 bp, Glycine max
  unsure (1)..(233): unsure at all n locations
agtttgttgatccgagataactagaacacagtgtgctgaaaatnaaggtccttgttttcttcgttgctacaattttggtagcatggcaatgcnatgcgtacgatatgttcccctnngaatantggctggctatggtgcccgtactccggaggtgaaatgcccnaattggnggcttgctgtgggancaacanaaaatctngggnttgnnanacttccccggagngngcntaaaa

SEQ ID NO: 294122 - DNA, 252 bp, Glycine max
  unsure (1)..(252): unsure at all n locations
ggcacaagtgagtttgttgatcgagataactagaaacagtgtgatgaaaatgaaggtccttgttttcttcgttgctacaattttggtagcatggcaatgccatgcgtacgatatgttccctctccgaatgaacactggctatggtgcccgtactccggaggtgaaatgccgcaagttggaggcttgctgtggangcacacaacactttggctttgagacnattcctgaagagtccctngaancaacaaaggg

SEQ ID NO: 294123 - DNA, 252 bp, Glycine max
  unsure (1)..(252): unsure at all n locations
aaaganacccggaaagggtgggaaccgcttttggaaatccattgggcttggatttaagactcccagggaagccatcgaaggaacctacgttgacaagaagtgccccttcactggcaatgtttccatccgtggccgtatcttggctggaacatgtcacagtgctaagatgaacaggactattattgttaggaggaattatctccatttatcaagaagtaccagaggtacgagaaaaggcactccaacattccg

SEQ ID NO: 294124 - DNA, 246 bp, Glycine max
atcagcggtgccccccaggataacaacataatgctgtggaatgctgtcatatttggtcctgatgatactccatgggatggaggcacgttcaagttgactctccagtttactgaggattatccaaataaaccaccaactgtgcgatttgtgtctcgcatgtttcatccaaatatttatgctgatggaagtatttgtttggtatactacaaaatcagtggagtcctatatatgatgtggctgctatac

SEQ ID NO: 294125 - DNA, 256 bp, Glycine max
  unsure (1)..(256): unsure at all n locations
gggagttcaacgagatggagcaaataaagcacagaacagttgaagtgaatgggcataaaaatgcatgttgcagagaaaggagagggtccagtggtgttgttcctccacggcttccctgagctctggtactcatggcgccatcagattctctctctcagctccctcngctaccgcgccgtcgctcccgatctccgtggctacggtgacccgaagcaccaccttcaatcagcagctacaactgcttccacatagtggg

SEQ ID NO: 294126 - DNA, 249 bp, Glycine max
gttttgagggtgacaacatgattgaggggtccaccaaccttgactggtacaagggaccaactctccttgaggctcttgaccaaatcaatgagcccaagaggccctccgacaagcctctaaggcttccattgcaggatgtctacaagattggtggtattggtactgtgccagtgggacgtgtagagactggggttgtgaagcctgtatggtggtgacttttggtcccactgggctgacaactgaggttaa

SEQ ID NO: 294127 - DNA, 248 bp, Glycine max
ggaacctttgcattctattcattcaagattcagcaagtgcgttttggaagcagagaccgaaatacttcgagatggcccgtacaaagcaaactgctcgtaagtcaactggaggaaaagctcccaggaagcagcttgcaaccaaggctgcacgtaagtctgcaccaacaactggtggtgtgaagaagcctcatcgttatcgcctggaactgttgctcttcgtgagattaggaaataccagaagagcactg

SEQ ID NO: 294128 - DNA, 245 bp, Glycine max
  unsure (1)..(245): unsure at all n locations
ggcgaaagcaaagttagttgagagagagaggagctgaggagaatcaatcgagagaaatatgtctggtatcgctcgtggacgccttgctgaggaacgaaagttcatgacgcaaaaaccatccacacggtttcgttgccaagcccgagactctacctgatggcaccgtaaatttgatggtctggcattgcactattcctggcaagaccgggactgattgggagggtgggnatttcccatgacaatgc

SEQ ID NO: 294129 - DNA, 265 bp, Glycine max
ctacttctttgtacttgggattgttgcactttcggcaacattattaccatttattaaacgttttctgccaaagcattggaacgatgacgttatagtctggcattttccatatttccgttctttggagattgagtttacaaagtcacaggtcgttgctggaatccctgggacttttttttgtgcatggtatgctttgcggaagcattggctagcaaatatatattgggtcttgccttctgtattcagggaattgaaatgctttctc

SEQ ID NO: 294130 - DNA, 243 bp, Glycine max
  unsure (1)..(243): unsure at all n locations
ggagaacaaaacaagtgtttcgaatagattatcctaagtctttgggaatagtgctgcaatggcttcaagtcaggaggaggtgacccttttgggagctactggaagcccatttgtgtgcagggttcatattgccctcaagttgaagggagttcaatacaaatangtcgaagaaaatttgaggaacaagagtgaactgttctcaaatccaacccagttcacaagaaggttccagtgtttattcac

SEQ ID NO: 294131 - DNA, 249 bp, Glycine max
  unsure (1)..(249): unsure at all n locations
aaaganacccggaaagggtgggaaccgcttttggaaatccattgggcttggatttaagactcccagggaagccatcgaaggaacctacattgacaagaagtgccccttcactggcaatgtttccatccgtggccgtatcttggctggaacatgtcacagtgctaagatgaacagggctattattgttaggaggaattatctcattttatcaagaagtaccagaggtacgagaaaaggcatccaacattc

SEQ ID NO: 294132 - DNA, 241 bp, Glycine max
ggtgctctgctcgtgcctctagggttatcatttctccatttccattttctctctcacttttcaagaatcgtaagctatgggaaagtcttacccaactgtgagtgctgattaccagaaggccgttgagaaggcgaagaagaagctcagaggcttcatcgctgagaagagatgcgctcctctaatgctccgtttggcaggcactctgctggaacctttgacaaggcacgaagaccggtggacc

SEQ ID NO: 294133 - DNA, 258 bp, Glycine max
  unsure (1)..(258): unsure at all n locations
atgcagaatcaaagtacctagcaggccttggagtttctcgtcagcgccaagccatagttgatgggctaagagacagtgttctagcattttctggtaatgtgcctggaacatcatcaaaggatatcatggacatggttctcatgactcaatattttgacacaatgaaggagattggtgcatcctccaaatccaatgctgttttcattccacatggactggtgctgtgatgagtngctcacaagtaaggatgnncccnca

SEQ ID NO: 294134 - DNA, 219 bp, Glycine max
  unsure (1)..(219): unsure at all n locations
agagaganagagaaatggagaagacananagtgttatcggcgaaggaggcattcgagaagcttgaaaaggtgggagaagggacatatgggaaggtgtacagagcaaganagaaggcaactgggaagatcgtggctctgaagaagactcgtcttccacggggacgaagaagggtccctccnannactctccgtggggttnncattctggcnaatgtctcc

SEQ ID NO: 294135 - DNA, 216 bp, Glycine max
  unsure (1)..(216): unsure at all n locations
gcaattgggaaggnatttgccatcggttctgcngcccttgtatctctggccctctttggtgcctttgtgagccgagctgctattacaactgttgatgtgttgactccaancgttttcattggtttgattgtgggtgcaatgcttccttactggttttctgccatgaccatgagagtgtgggaagtgctgctctgaagatggttgaggaatacnnag

SEQ ID NO: 294136 - DNA, 247 bp, Glycine max
  unsure (1)..(247): unsure at all n locations
gaggtcaaagataattgagattgtagcagcacgtgacattgtttttgcacttgcacnatccggtgtttgtgctgcatttagccgagagaccaatgaaagaatatgcttcttgaatgtcagtcctgatgaagtcataaggagtttgttttataataaaaataatgactcacttatcacagtctctgtctatgcatcagacagtacagttctttaaaatgccgaagcacaaggatcgaatatataagga

SEQ ID NO: 294137 - DNA, 249 bp, Glycine max
ggaagtgaagggaactggaactgctaatcagtgcccaaccattgaaggtggagtggactcatttgccttcaaggcagggaaatacaaggcccagaagttgtgcctggaaccaacttccttcacggtgaaggcagagggtgtggccaagaatgccccgctcgaatttcagaacaccaagctcatgactcgtctgacctacacctggacgagatcgagggtcccttcgaggtttcatccgatggaacggtg

SEQ ID NO: 294138 - DNA, 240 bp, Glycine max
gatgtcatagtattatcattcattctgcatcctttctgctcttctctctccacccaaaccctaactcccgaccctgttcccctctcgtatccgtcatgaaaggaggaaagtccaagaccgaatctaagagagccgatcccaaacttgctgtgaataagaagggagccgccaccaaggctaggaaacccgccggcaaggggaaggcagcgaaagaccctaacaagccaaagaggcctccaa

SEQ ID NO: 294139 - DNA, 240 bp, Glycine max
  unsure (1)..(240): unsure at all n locations
ggatgcacaagtttgttgagatagctagaagcaataagatgaaaatgaaagtgcttgttttgtttgttgctacagttttggtagcatatgaatgccatggctcagactaccagaagttccctctccaaatgaaaactgggtttggtgggcaatacagcaatgaggtggcatgtgccagttggaggcttggcgtggaagcaaacaacgtatcaaagtggcaaactgtncggcagntggggg

SEQ ID NO: 294140 - DNA, 233 bp, Glycine max
gatttcactgagctacaagagaaggaaccctggctttcatcttctaaattggttgttaaacctgacatgttatttggaaagcgtggcaaaagtggtttggttgccttgaatttggattttgcacaagttgtttcatttgtgaaggagcgtcttggaaaagaggttgagatgagtggatgcaaaggaccataacaactttcatgttgaacctttcatcccacacaatgaagagt

SEQ ID NO: 294141 - DNA, 239 bp, Glycine max
gatatctggcagcagaagaacaagtagttgagaactaagaaggagaagcaaatggcttcctcaatgatctcttccccagctgttaccactgtcaaccgtgccggtgccggcatggttgctccattcactggcctcaagtccatggctggcttccccaccaggaagaccaacaatgacattacctccattgctagcaacggtggaagagtgcaatgcctgcagtgtggccaccagttggc

SEQ ID NO: 294142 - DNA, 253 bp, Glycine max
  unsure (1)..(253): unsure at all n locations
ttttagagaccattcccggggtgaagattgtatatagaacaagggagttagaggagcagcaagctaaaagccgaatatggaatgagacatggttggcaaccttcttctacaaaccatgtaattatgagttgtttgtgaagcaatctttgaacatggaaatggctattgtcatggcaagggattctggaatggattggataattnattccgatactgatgagctgatgcatccagcaggaacgcaagagtattc

SEQ ID NO: 294143 - DNA, 243 bp, Glycine max
gagagaaagagagagaaagatgtcgaagcgtggtcgtggtggttcggcggggaacaagttccgcatgtcgctgggtcttccagtggcggcgacggtgaactgcgccgacaacacgggggcgaagaacctctacatcatttcggtgaaagggatcaaaggccgtttgaaccgtcttccctcggcctgtgttggcgacatggtgatggccaccgtgaagaagggaaaacccgatctgaggaagaa

SEQ ID NO: 294144 - DNA, 242 bp, Glycine max
ggcagcatcgtagagaaataagggaaaaatggtgtcgctgaaactgcagaagcgcctctccgcaagcgtgctcaagtgcggcagaggaaaggtttggcttgaccccaatgaagtcaacgaaatctccatggccaattctcggcaaaacatcaggaagttggttaaggatgggtttatcatcaggaagccaaccaagattcactcccgctcacgtgctcgtaggatgaaggaggcaaagagga

SEQ ID NO: 294145 - DNA, 256 bp, Glycine max
ggcaacacaacaaaaaaagacaacccagagagcgcgtcttaataaacgctcttctctgaaaacccccatttcttttcttctttcttcttctctttcgcttcttcgatcttcgatcttcgtcgctgaaaatgagagagtgcatttcaatccacatcggccaggccgggattcaggttggaaacgcctgctgggagctttactgcctcgaacacggcattcagcctgatgggcagatgccaagtgacaagaccgttgg

SEQ ID NO: 294146 - DNA, 244 bp, Glycine max
ggcacaagtgagtttgttgatcgagataactagaaacagtgtgatgaaaatgaaggtccttgttttcttcgttgctacaattttggtagcatggcgatgccatgcgtacgatatgttccctctccgaatgaacactggctatggtgcccgtactccggaggtgaaatgcgcaagttggaggcttgctgtggaagcacacaacatctttggctttgagaccattcctgaagagtgcgttgaagca

SEQ ID NO: 294147 - DNA, 246 bp, Glycine max
gaccacactgaggagggagacagtggaaggaaggaacactcaaatcactgaaccagccatggctaccttctccaaggaacgcgagaactttgtatacgttgccaagttagctgaacaagctgaacgctatgatgaaatggtggaggccatgaagaaggtggcgaactgggacgttgagttgagtgtggaagagaggaacctgttctctgttgggtacaagaatgtggtggggtcacggagagcttc

SEQ ID NO: 294148 - DNA, 243 bp, Glycine max
ggaaaacttagtggaggtataaatcgagaaggaataaattattacaacaatctcatccatgaattgcagactaaaggtttaaaaccttttgtgaccctttttcattgggatctcccccaagctttagaaaatgagtataaaggcttcttatccgagtccattatagatgattttggagactatgcgaaattttgtttcgaagaatttggagatagggtgaagcattggattacttttaatgaa

SEQ ID NO: 294149 - DNA, 256 bp, Glycine max
aaaaactgatgacaatattccaatgcctacctattttcgtttccttgctttagttgccttcaagatatttgcagcagagcaggtcgatgttgctataatggaggtaggattaggtggaaaatacgatgcaacaaatgtggttcagtcacctattgtatgtggaataacttctcttgggtatgaccacatggagattcttgggaatactctgggagaaattgctggtgagaaggctggcatcttcaagaatcggatt

SEQ ID NO: 294150 - DNA, 258 bp, Glycine max
actgttggttgggttctgaatgcaatagacaagcaaaattttgtttctcctcccccagttgctattcttcctgctggtacaggaaatgatcttgctagagttctctcctggggaggtggcttgggtccagtggagaggcaagggggtcttactacatttttgcaacacatagaacatgctgctgttacggttcttgaccgttggaaggtaacaattagtaatccacaaggaaagcaacagctgcaaccaacaaagttt

SEQ ID NO: 294151 - DNA, 242 bp, Glycine max
ggcagcagcaactttaaacgccgaagaaagttcatccaatctccgaagcccttcaccgcattgcaaccatgtcgagaagaaaggttagagagccaaaggaagaaaacgtgactctgggcccagctgttagagatggcgaacatgtctttggcgccgctcgcatctttgcctccttcaatgataccttcattcatgtcactgatctgtccgggagggaaacacttgtccgcatcacaggtgga

SEQ ID NO: 294152 - DNA, 238 bp, Glycine max
aatccgtagagctacagtgaacacttttggatatattgcaaaagccattggaccacaaggtgtcttggcaaccctattgaataatctcaaggtgcaggagaggcagaaccgtgtttgcacaaccgtagccattgcaattgttgcagaaacatgttcacccttcacagttttaccagcattgatgaacgagtatcgcgtgccggagcttaatgtgcaaaatggtgtgctcaagtccctc

SEQ ID NO: 294153 - DNA, 237 bp, Glycine max
ggaaaccaaattttcttccttcgttggcatctgtgatctcttctcctcacaatgagcagatcagggcaaccaccggatttgaagaagtacatggacaagaagcttcagatcaagctgaatgcaaatcgcatggttgttggtactctccgtggcttcgaccagtttatgaatttagttgttgacaacactgtggaagtgaatggcaatgagaaagatgacatagggatggtggtaatc

SEQ ID NO: 294154 - DNA, 249 bp, Glycine max
gagagatgtggatattaaaaattatatcaaagttgagaaggtcccaggtgggcagctagaagattcaagagttctcaagggagttatgataaacaaagatgtggttgcccctggcaaaatgaggagaaagattgttaatccacgtatcattcttctagtcagtccccttgagtataaaaagggtgaaaaccaaacaaatgctgaactgctcaaagaagaagactggagtctcttattgaagatggaaga

SEQ ID NO: 294155 - DNA, 238 bp, Glycine max
  unsure (1)..(238): unsure at all n locations
ggagaagaaaaaggcaaatttcttgtcttctgaggactttgagcctcctcttatcccttccaagacaatccctgatncctgatgataagaaacctgaggactgggacgaaagagccaaaatcccggacccaagtgctgtgaagccagatgactgggatgaggatgcacccacggaaattttagatgaagangcagagaaacctgaaggatggttggatgacgagccagaggaaattga

SEQ ID NO: 294156 - DNA, 223 bp, Glycine max
  unsure (1)..(223): unsure at all n locations
acgcggtagtttgncaganacacgtatcttcatcaatanatcgcagaagcagtttcncgtgcatctcatcgtcttccaaaatgaacgacgcagatgtctcgaagcaaatccagcagatggtgcgtttcatccgccaggaagctgaggagaaagccaacgagatctctgtatctgccgaagaggaattcaatatcgagaagctgcagttggttgaagccgaaaa

SEQ ID NO: 294157 - DNA, 256 bp, Glycine max
  unsure (1)..(256): unsure at all n locations
ggttctagtgtgtgattgtttgttgttgtaactcgttcttcttcttntgttgttctgtgtttgtgtttgttttttctctcacctgaaaatgtcttgctgcggtggtaactgtggttgcggaagcttcctgcaagtgcggcaacggctgcggaggctgcaagatgtcacccagacttgaggctacactgagtcaaccaccaccgagaccttggtcatgggagtggcacctgttaaggctcaatttgagggtgctgaa

SEQ ID NO: 294158 - DNA, 238 bp, Glycine max
ggagttgagaatggaaggagggaaacgaggcacgattctggtcaccaacgacgacggtatcgatgctcctggcttaagagcattggttcactccctcgtcaacgccaaccttttcaacgttctagtgtgcgctcctgatagcgagaaatcagctgttagccacagcatcacttggctccatccagtagctgttaagcaagtacagatcgagggaaccaccgcatttgctgtttctggg

SEQ ID NO: 294159 - DNA, 216 bp, Glycine max
ggagtgttagtgtacctcaagccaccgtaccgtgttgcctctctgcaatctacagccaaaatgcctttcaagaggtacgttgagatcgggagggttgcccaaatcaactacggcaaggaatatggcaggctcgtcgtcattgtcgacgtcattgatcagaacagagctcttgtcgatgcccctgatatggtgaggtcccaagtcaatttcaaaagg

SEQ ID NO: 294160 - DNA, 234 bp, Glycine max
ggcctgcagagttgattgccaagtttttggatgagaaacttcgtgcaggtaacaaaggcacttcagaagaagagttggagggtacacttgataaagtcctggttttattcaggttcattcagggcaaggatgtgtttgaggcattttataagaaagatcttgcaaaaagactactgttaggaaagagtgcttctattgatgcagagaaatctatgatctccaagttgaagaccg

SEQ ID NO: 294161 - DNA, 232 bp, Glycine max
gagagaagtatcaagaaaagcaaaagggaaggattgggatcctcttggattttgtttggtatgagcctcttacaagatcaaaggccgacaatttagcagctcaaagagccagagactttcatgttggatggttcattcatccccttgtttatggagagtatccaacaaccattcaaaatattgttgggaatagactccccaaattcactagtgaagaagttaaaatcgtgag

SEQ ID NO: 294162 - DNA, 260 bp, Glycine max
  unsure (1)..(260): unsure at all n locations
ggtagttccaccgagtagcaacaatgtcgaagcgaggtcgcggaggatcggcgggaaacaagttccgcatgtcgctgggtctnccggtggcggcgacggtgaactgcgccgacaacaccggcgcgaagaacctctacatcatatcagtgaaggggatcaagggtaggctgaaccggttgccgtcagcttgcgtcggagacatggttatggccaccgtcaagaagggaaagcccgatctccgtaagaaggtgctgcccgcc

SEQ ID NO: 294163 - DNA, 122 bp, Glycine max
catacaaaagggtggctcatatgtgaattattacatgtaccatggaggaactaactttggacgatcagctggaggcccattcataactacaagctatgactatgatgctccaattgatgaat

SEQ ID NO: 294164 - DNA, 270 bp, Glycine max
  unsure (1)..(270): unsure at all n locations
caatggaaagggaatcaagttccaaatcctttcaaaccctgaattccttgctgagggaactgcaatccaagatcttttcaacccggatcgagtcctaattggaggcagggagaccccagaaggccaaaaagcaattcaaacattgaaaaatgtgtatgctcattgggttcctgagaagaaaattctaaccacaancctctggtctgctgagctatccaagcttgctgctaatgcctttttggcacagagaatttcatctgtgaatgctat

SEQ ID NO: 294165 - DNA, 258 bp, Glycine max
gggtgttgtccttgcagttgaaaagcgcatcacttcgccgcttctggagccaagtagtgttgagaaaattatggaaattgatgagcatataggttgtgcaatgagtggattgattgctgatgctcgaagcacttgttgagcatgcacgggttgaaactcagaatcataggttctcatatggtgaaccaatgactgttgagttcacaacccaagctctttgtgatctagccttgcgttttggtgaaggtgatgaagaat

SEQ ID NO: 294166 - DNA, 257 bp, Glycine max
  unsure (1)..(257): unsure at all n locations
ggttgtgaatcaacataaatattccgttttgcgtttctctgcctaaaaggattgaaagatgggtcaagcactaggttgctatcaagttgatcagtcaaatgtggctatcaaggagcattttggaanattgcntgatgtcctagaacctggatgtcattgcctgccttggtgtcttgggtaccagattgctggtagtttgtcactgcgtgtgcagcaacttgatgttcgatgtgagacgaaaaccaaggacaatgtct

SEQ ID NO: 294167 - DNA, 263 bp, Glycine max
  unsure (1)..(263): unsure at all n locations
ggcacaagtgagtttgttgatcgagataactagaaacagtgtgatgaaaatgaaggtccttgttttcttcgttgctacaattttggtagcatgggcaatgccatgcgtaacgaanatgttccctctcccgaatgaacactggctatggtgcccgtactccggaggtgaaatgcgcaagtgggaggcttgctgtggaagcacacaacatctttggcttgagaccattcctgaagantgcgttgaagcaacaaaggaatacatcc

SEQ ID NO: 294168 - DNA, 252 bp, Glycine max
  unsure (1)..(252): unsure at all n locations
aacgtaggatttaatgngaagaatgttgcagtcaaggatctcaagcgtggttttgtngcctcanactctaaggatgatcctgccaaggaggctgccaanttcacatcccaagtcatataatgaaccatcctgggcaaattgggaatagnatgcgcctggcctgatgccanactctcacaatgccgtcangttggcgnggtgtnccaagatggcagggnctgtaagagatgagagggccaatctgaaatgggg

SEQ ID NO: 294169 - DNA, 277 bp, Glycine max
  unsure (1)..(277): unsure at all n locations
caggaaaacaaggaaggtttggaattgctgaaaactgccattgccaaagctggttacacaggcaaagttgtcattggaatggatgttgcagctttctgaattctacaaggaagataaaacatacgatttgaacttcaaggaagataacaatgatggctcacagaagatcnctggagangcnttgaaagatctatacaagtcatttgtgacagagtatccaattgtttcaattgaggatcctttgancaggatgactgggagcactatgctaagctta

SEQ ID NO: 294170 - DNA, 256 bp, Glycine max
ggaacaaaacaagtgtttcgaatagattatcctaagtctttgggaatagtgctgcaatggcttcaagtcaggaggaggtgacccttttgggagctactggaagcccatttgtgtgcagggttcatattgccctcaagttgaagggagttcaatacaaatatgtcgaagaaaatttgaggaacaagagtgaactgcttctcaaatccaacccagttcacaagaaggttccagtgtttattcacaatgagaagcccat

SEQ ID NO: 294171 - DNA, 269 bp, Glycine max
ggtgatttgagaggatcgtgagagggacggtagcagagattccgtgagttgcaaaaatgaaaacaattctttctgcagagaccatgaacatcccggacggcgtgagcgtcaaggttaatgccaaggtcatcgaagttgaggggcccccgcggaaaattggtgcgagacttcaagcacttgaatcccgattttcagctcatcactgacgaaaacggtaaaaggaagctgaaggtggaggcctggttcggttctcggaaaacatccgccgc

SEQ ID NO: 294172 - DNA, 266 bp, Glycine max
gatgttaaaaaccaatataaatatggtgaagaagggtttaggtgggttttgagcacttggcacagaagagcacgctgagagaaaggaagatgatcatcccccgttcgttgtttcacctgcggaaaggtcttggaaacaaatgggatacctatttggacccttctggcagtcagattacagtgaaggagatgcactggatgctttgggactggttcgatattgctgtaggcgcatgcttatgacccatgtcgatctcattgagaatt

SEQ ID NO: 294173 - DNA, 252 bp, Glycine max
ggcgtttgtaagagcatataaataacatagtcctccttcctttgttttttccacatcacgacatcacatcgcagagaagaacagagagagatccatccatcaattccaatggccgatcagctcaccgacgaacagatctccgagttcaaggaagccttcagcctcttcgacaaggacggggatggttgtattaccaccaaggaattgggaccgtgatgcggtcattggccagaacccaactgaggcagagct

SEQ ID NO: 294174 - DNA, 221 bp, Glycine max
  unsure (1)..(221): unsure at all n locations
ggcctagganncgtantcatctactctgagccgcatcacttcccggaatcgtgcatccctacgttcaatatgtcgctggtggcaaacgaggatttccagcacatacttcgtgttttgaacacgaacgtagatgggaagcagaagataatgttcgctcttacctcaatcaaaggtattgggaggcgattgctaacatttgctgcaagaaggctgatgttgac

SEQ ID NO: 294175 - DNA, 258 bp, Glycine max
  unsure (1)..(258): unsure at all n locations
gntccatctttttcttcttactcnagactcttccttttctcttctctgtctaaggggtgccctgagatcacattgaacaatggtgaangctgtggncgtntcttggcagcngtaagggtgtcactggaactattcacttcgttcaggagggaantggtccaaccancgtaactggatctcttgctngtcttaagcctggtctccanggnttccatgtccatgccttcggggncataccaatggttncnnctcaactgg

SEQ ID NO: 294176 - DNA, 267 bp, Glycine max
  unsure (1)..(267): unsure at all n locations
gggncgaagagtattaggtttgagtgcggcgtcaaacactcttctctgcagcttttgcctacaactcccttcaccatggctgaacaaaccgaganagttttctgaagcaaccaaaagtgtttctcagcacaaagaagactgggaagggaaagagacctggaaaaggtgggaaccgcttttggaagtccattggggcttggatttaagactcccagggaagccatcgaaggaacctatattgacaagaagtgccccttcantggcaat

SEQ ID NO: 294177 - DNA, 261 bp, Glycine max
  unsure (1)..(261): unsure at all n locations
ggcacttcaattgcaatcaaattagttcattctctttgcgcagttccctacctctcctttcaagatgcagatcttcgtcaagacccttcaccggaaagaccatcaccttgaggtggaaagctctgacaccatcgacaacgtcaaggccaaggaccaggancaggaaggaattcccccggatcagcaagtctcatcttcgccggaaagcagctcgaggaggccgtaccctcgcngantacaacatccagaaggagtcaaccc

SEQ ID NO: 294178 - DNA, 251 bp, Glycine max
ggaatttgatttctcagggaggttatctttatgtttgtggtgatgctaagggcatggcccgagatgttcatcggactcttcataccattgtccagcagcaggaaaatgtggactcttcaaaggcagaggctatagttaaaaaactccagatggatggacgttatcttagagatgtctggtaaattttctgattattcatctttctgggttgtgccttccttgctatttggtctgttaagttcaagattggt

SEQ ID NO: 294179 - DNA, 264 bp, Glycine max
  unsure (1)..(264): unsure at all n locations
tgatcctgagtatgctaagcagctggttgaagaaacatggggcaagcacaaggatgctgagaaggcagcatttgaggaggccgagaagaagagggaagaggaggaatcaaaggatgacccagttgactctgatgctgatgaggaagaggaaatgctgatgaagctggccatgactccgctgcngatccaagacgggaacttggagaagaccaccaaggaagaaggtntaattgttgactctaggaanttgccaaacggttaaga

SEQ ID NO: 294180 - DNA, 250 bp, Glycine max
gatagcaaaatcgtttctccaatttaatcaccattgtacaacccaattcccttcgtcgttttcgattaagagagcaatggcacgtaccaagcaaaccgctcgcaagtccaccggaggaaaggctccgaggaagcaattggcaaccaaagccgctcgcaagtcagccccggcgaccggcggagtgaagaagccccaccgcttcaggccaggaacggtggctctgagggagattcgaaagtaccagaagagc

SEQ ID NO: 294181 - DNA, 264 bp, Glycine max
  unsure (1)..(264): unsure at all n locations
ggcacaagtgagtttgttgatcgagataactagaaacagtgtgatgaaaatgaaggtcctgttttcttcgttgctacaattttggtancatggcaatgccatgcgtaacgntatgttccctctccgnatgaacactngctatgggtgnccgtactccggaggggaaatgcgcaagttggaggcttgctgtggaagcacacaacatctttggcttngaganccattcctgcaagagtgcgttgaagcnacaaagggatacatcct

SEQ ID NO: 294182 - DNA, 257 bp, Glycine max
ggagcaaaaccctaatccctatttttcttcctcagtagtgtcatttacgcttctcttctctgcagcaactatgcctaaccctaaggtcttcttcgacatgaccatcggcggtcaatctgctggccgcatcgtgatggagctctacgccgacgtcactccccgcaccgccgagaacttccgcgcgctttgcaccggcgagaagggcgtagggcggagggcaagcccctccactacaagggctcgtcttccaccgcgtg

SEQ ID NO: 294183 - DNA, 246 bp, Glycine max
  unsure (1)..(246): unsure at all n locations
gggggaagaagcagttaacattgcatctgctgctgcacttgctcctgatgatataatattgcctcagtaccgggagcctggagttctattgtggcgtggttttacactgcaacaatttgttcatcaatgctttggaaacacacatgattttggaaaaggcaggcagatgccaatacattatgggtctaaccagcacaattacttcacagtgtcatcccccattgcaacacaattcctcagctgtng

SEQ ID NO: 294184 - DNA, 249 bp, Glycine max
gatctgggcagcagaaaaacaagtagttgagaactaagaagaaggaaatggcttcctcaatgatctcctccccagctgttaccaccgtcaaccgtgccggtgccggcatggttgctccattcaccggcctcaaatccatggctggcttccccacgaggaagaccaacaatgacattacctccattgctagcaacggtggaagagtacaatgcatgcaggtgtggccaccaattggcaagaagaagttcg

SEQ ID NO: 294185 - DNA, 247 bp, Glycine max
  unsure (1)..(247): unsure at all n locations
ggaacctttgcattctattcattcaagattcagcaagtgcgttttggaagcagagaccgaaatacttcgagatggcccgtacaaagcaaactgctcgtaagtcaactggaggaaaagctcccaggaagcagcttgcaaccanggctgcacgtaagtctgcaccaacaactggtggtgtgaagaagcctcatcgttatcgccctggaactgttgctcttcgtgagattaggaaataccagangggcnc

SEQ ID NO: 294186 - DNA, 241 bp, Glycine max
ggttctagtgtgtgattgtttgttgttgtagctcgttcttcttcttttgttgttctgtgtttgtgtttgttttttctctcacctgaaaatgtcttgctgcggtggtaactgtggttgcggaagctcctgcaagtgcggcaacggctgcggaggctgcaagatgtacccagacttgagctacactgagtcaaccaccaccgagaccttggtcatgggagtggcacctgttaaggctcaattt

SEQ ID NO: 294187 - DNA, 239 bp, Glycine max
  unsure (1)..(239): unsure at all n locations
ggcacaagtgagtttgttgatcgagataactagaaacagtgtgatgaaaatgaaggtccttgttttcttcgttgctacaattttggtagcatggcaatgccatgcgtacgatatgttccctctccgaatgaacactggctatggtgcccgtactccggaggtgaaatgcgcaagttggaggcttgctgtggaagcacacaacatctttggctttgagaccattcctgaagagtgcgtna

SEQ ID NO: 294188 - DNA, 235 bp, Glycine max
  unsure (1)..(235): unsure at all n locations
ggaacctttgcattctattcattcaagattcagcaagtgcgttttggaagcagagaccgaaatacttcgagatggcccgtacaaagcaaactgctcgtaagtcaactggaggaaaagctcccaggaagcagcttgcaaccaaggctgcacgtaatctgcaccaacaactggtggtgtgangaagctcatcgttatcgccctgggaatgttgctcttcgtgagattaggaactgcc

SEQ ID NO: 294189 - DNA, 241 bp, Glycine max
  unsure (1)..(241): unsure at all n locations
aaagagacccggaaagggtgggaaccgcttttggaaatccattgggcttggatttaagactcccagggaagccatcgaagggacctacattgacaagaagtgccccttcactggcaatgtttccatccgtgnccgtatcttggctggaacatgtcacagtgctaagatgaacaggactattattgttaggaggaattatctccattttatcaagaagtaccagaggtacgagaaaaggcac

SEQ ID NO: 294190 - DNA, 238 bp, Glycine max
  unsure (1)..(238): unsure at all n locations
ggcacaagtgagtttgttgatcgagataactagaaacagtgtgatgaaaatgaaggtccttgttttcttcgttgctacaattttggtagcatggcaatgccatgcgtacgatatgttccctctccgaatggacactggctatggtgcccgtactccggaggtgaaatgcgcaagttggaggcttgctgtggaagcacacaacatcttcnnctttgagaccattcctgaagagtgcgtt

SEQ ID NO: 294191 - DNA, 161 bp, Glycine max
aacaagaagagcgttgagacctacaagatctacatcttcaaggtgttgaagcaagtgcaccccgacatcgggatctccagcaaggctatggggatcatgaacagtttcataaacgacatcttcgagaagctcgcccaggagtcatcgcgtctcgctaggta

SEQ ID NO: 294192 - DNA, 238 bp, Glycine max
ggcacaagtgagtttgttgatcgagataactagaaacagtgtgatgaaaatgaaggtccttgttttcttcgttgctacaattttggtagcatggcaatgccatgcgtacgatatgttccctctccgaatgaacactggctatggtgcccgtactccggaggtgaaatgcgcaagttggaggcttgctgtggaagcacacaacatctttggctttgagaccattcctgaagagtgcgtt

SEQ ID NO: 294193 - DNA, 196 bp, Glycine max
  unsure (1)..(196): unsure at all n locations
gagggagagtcttgacgctccatcaagatgggtatttctagggattccatgcacaagaggcgtgccactggtggcaagaagaaggcatggagaaagaagagaaagtatgagcttgggcgtcaggccgcaaacaccaagttatcaagcaacaaaactatccggaggnttcgtgttcgnggtggcaatttnaangggg

SEQ ID NO: 294194 - DNA, 237 bp, Glycine max
ggataataattaggtagaaaaaatactatggggaggggaagagtggaactgaaaaggatagagaacaagataaacaggcaggtaacgtttgcaaagaggagaaatgggcttctcaagaaagcctatgagctttctgttctctgtgatgctgaggttgcactcatcatcttctccacccgtggcaagctttataaattctgcagcaccaacagcatgctcaaaacacttgaaaggtac

SEQ ID NO: 294195 - DNA, 240 bp, Glycine max
  unsure (1)..(240): unsure at all n locations
ggcagcaacagcagcattcactgaaagcactcagtagggtttgcggtttcagagtttgtgacgcacgcatccatggnnnnnnnnnnnnnnnnnnnnnnagccccgccgcgccagctctcccagaaggaagccgacatccagatgatgttagccgccgacgtccacctcggcaccaaaaactgcgacttccaaatggaacgttacatcttcaagcgccgcaacgacgggatttacattatt

SEQ ID NO: 294196 - DNA, 235 bp, Glycine max
atcagtggtgccccccaggataacaacataatgctgtggaatgctgtcatatttggtcctgatgatactccatgggatggaggcacgttcaagttgacactccaatttactgaggactatccaaataaaccaccgactgtacgatttgtgtctcgcatgtttcatccaaatatttatgctgatggaagtatttgtttggatatattacaaaatcagtggagtcctatttatgatg

SEQ ID NO: 294197 - DNA, 235 bp, Glycine max
gaaaggttggaaagaagacggcaaatgccttatcatatgcacatcaatcttgagctcctggagacagtacatcttgtatctgctatgctgctggaagttcctaatatggcagccaatgttcatgatgcaaaacgcaaactcatatctaagactttccgtcgcttgcttgaggtgagtgacagacaaacattcactggtccaccagaaaatgtaagagatcatgttatggctgcca

SEQ ID NO: 294198 - DNA, 236 bp, Glycine max
ggagttcaacgagatggagcaaataaagcacagaacagttgaagtgaatggcataaaaatgcatgttgcagagaaaggagagggtccagtggtgttgttcctccacggcttccctgagctctggtactcatggcgccatcagattctctctctcagctccctcggctaccgcgccgtcgctcccgatctccgtggctacggtgacaccgaagcaccaccttcaatcagcagctaca

SEQ ID NO: 294199 - DNA, 232 bp, Glycine max
  unsure (1)..(232): unsure at all n locations
gggatgaggatcatgcattcaagaagattaggttgagagctgaagatgtgcaagggaagaatgttctgacaaatttctggggaatggatttcacaacagacaagctgaggtcattggtacgaaaatggcaaactcttattgaagcccatgtggatgtgaagacaactgataattacacattgaggatgttttgcatnggnttnccangngaaggncccncccgnggaagacc

SEQ ID NO: 294200 - DNA, 235 bp, Glycine max
caagcatgaaagctgtgggcagtgcaccccatgcagagaggggactggttggctttggacgatcatggaaagaatgaaagttgggaatgccaagttagaagaaattgatatgcttcaggagttgaccaaacaaattgaagggcatacaatttgtgccttgggtgatgctgctgcatggccagtgcagggtctatcaagcatttcaggcctgagcttgagagaaggattagagagc

SEQ ID NO: 294201 - DNA, 234 bp, Glycine max
  unsure (1)..(234): unsure at all n locations
ggcacaagtgagcttgttgatcgagataactagaaacagtgtgatgaaaatgaaggtccttgttttcttcgttgctacaattttggtagcatggcaatgccatgcgtacgatatgttccctctccgaatgaacactggctatggtgcccgtacncncnaggtgaaatgcgcaagttggaggcttgctgtggaagcacacaacatctttggcttgagaccattcctgaagagtgc

SEQ ID NO: 294202 - DNA, 230 bp, Glycine max
  unsure (1)..(230): unsure at all n locations
ggtgatattgacaaatacaatgatatttatttttatagttacatttttttgaagggcagaaattgtagtgaaagcgataattctagtactagtataataactagtacgaatgatacaaatgatagtgattccactataggagaaagttctaataatctcgatgaaagtcaaaaatataagctttgtggcttgaatgcgaaantngttanggtnaatttataaaaattttt

SEQ ID NO: 294203 - DNA, 231 bp, Glycine max
  unsure (1)..(231): unsure at all n locations
ggtcactatgttcctcagttgtctcaacttgtttaccggagaaataaaggaatcgagaatccagttataaatttcaagggttttatggttggaaatgcagtcattgatgatttccatgattatattggaacatttgagtactggtgggtcaatggtttgatttcagattccacatataagaagctgggaattgcctgtgacttttattcttcngagcatccaccagagatg

SEQ ID NO: 294204 - DNA, 252 bp, Glycine max
  unsure (1)..(252): unsure at all n locations
gcacaagtnagtttgttgatcnagataactagaaacantgtgatgaaaatnaaggtccttgttttcttcgttgctacaattgttgtagcatggcantgccatgcgtacgatatgttccctctccgaangaacactggctatggtgcccgtactccggaggtganatgcncaagttgggaggcttnctgtggaagcacacancatctttggcttngagnccatcctgnggntggntttaagcaacaaaggata

SEQ ID NO: 294205 - DNA, 254 bp, Glycine max
gtacaaggttggagctcctgctcgtgttggtttggttgccccaattgatgttgttgttcctcctggcaacacagggctcgatccctcccagacctctttcttccaggtgctcaacattcctaccaagattaacaagggtactgttgaaatcattacccctgtggagctcattaagaagggagacaaggttggatcttctgaagctgcattgcttgccaagctagggataaggcccttctcgtatgggcttgtgg

SEQ ID NO: 294206 - DNA, 222 bp, Glycine max
gtacaagaactatgattttggcagatgcccacgagtttactgctctggacaaccttgtattccagttggtcagtcagacatccctaggtctagtactgtgaaaatatactgccctaggtgtgaagacatttactatcctcggtccaagtatcaaggcaacattgatggagcttattttggaactacatttcctcatctgttcttgatgacttatggacaact

SEQ ID NO: 294207 - DNA, 240 bp, Glycine max
  unsure (1)..(240): unsure at all n locations
gcagtgaaagaaacaacaccagatggtgaggaggatcaagagaaaggagtgcctgcattttggcttactgccatgaaaaacaatgaagtgttggctgaggagatttcagagcgtgatgaaggtgctcttaagtatctcaaagntatcaagtggagcaggatnganaacccgaaaggnttcanacttgactttttctttgncacnaacccttnttttatcaattctgtctnanaanaacat

SEQ ID NO: 294208 - DNA, 247 bp, Glycine max
  unsure (1)..(247): unsure at all n locations
gaatcaagaatacaataacatagcatagagtgagaagtgagaagagaaaaatggcaatctccatacccagtagacaacttttcatagatggagagtggaaagtccctcttctcaacaatcggtttccgatcatcaaccccgctactgaagacatcatagggcatattccagccgctactaaggaagatgttgaccttgcggtggatgctgctaaaagagccttttcccntaacaaaggcaaagattg

SEQ ID NO: 294209 - DNA, 246 bp, Glycine max
ggggatttgagacacagggtgtcattcctgatatagttaccatggcaaagggtattggcaatggtctgccattaggagctgtagttacaactccagaaattgcaagtgtgttggcccaaaagattcaatttaatacctttggtgggaaccccgtttgctctgctggtggacttgcagtgcttagggttcttgacaaggagaagcgtcaagctcactgtgccgatgttggatctcattgcttgaacg

SEQ ID NO: 294210 - DNA, 221 bp, Glycine max
  unsure (1)..(221): unsure at all n locations
ctnctattgtatgttacaatctgctgtgatacaggaaacagggtattctactacatacccatcggggggtaggatgataatgagtagcatgtatctctaaatctgattttacagggcagccgaatacaataaagataccaacaaatatcattttaaatagaaggaaagcgcggcattctcatatgganacaacacttgcagttctgttacacttcacaagc

SEQ ID NO: 294211 - DNA, 240 bp, Glycine max
  unsure (1)..(240): unsure at all n locations
gacacaccgtttgttctattcttaactcaacttctgctacccactctcttcttccaagtccaaccacgcttttctctacagtcatgggcaaggtcaagatcggaatcaacggatttggaagaattggccgtttggttgccagagtcgctctgcaaaganacgatgtggagctcgttgccgttaacgaccctttcattaccaccgattacatgacatacatgtttaaatacgacagtgttc

SEQ ID NO: 294212 - DNA, 243 bp, Glycine max
  unsure (1)..(243): unsure at all n locations
aataaaagacaaaagaaacaaaangctacatagcatacagtctgtcttctcttctcttctccggttatggcgtccgccttgggcacttcttcaattgcggttctgccttcgcgctacttctcttcttcttcttccaagccttccattcacactctctctctaacttcagggcagaactatgggcggaagttttatggaggaattggaatccatggcataaagggaagggctcagctctcggtt

SEQ ID NO: 294213 - DNA, 238 bp, Glycine max
ggaacaaaacaagtgtttcgaatagattatcctaagtctttgggaatagtgctgcaatggcttcaagtcaggaggaggtgacccttttgggagctactggaagcccatttgtgtgcagggttcatattgccctcaagttgaagggagttcaatacaaatatgtcgaagaaaatttgaggaacaagagtgaactgcttctcaaatccaacccagttcacaagaaggttccagtgtttat

SEQ ID NO: 294214 - DNA, 233 bp, Glycine max
gacagaacaatactgcaatagagaaagaggcagatagaaaaaaagagcgacttttgagttcaaaagatgactaacttcccattgatcaacttggagaagctcagtggtgaggaaagaaacgataccatggaaaaaattaaagatgcttgtgaaaactggggattctttgagctggtgaatcatggcattcctcatgacatattggacactgtggagaggttgaccaaagagca

SEQ ID NO: 294215 - DNA, 230 bp, Glycine max
ccagggtttccaatgaaactgtcagggggaaacctggtaaagttgttactcgttgggataacaccaaatagtttgttataggacacattaagtagagagagactaatgcaatttgaaagtgatgccacatcgccagtcaatttgttattttcaagtctcaaggatatcatgttttgaagctgactaagttcatcaggaatcaagccagagagttgattatttgaaagatc

SEQ ID NO: 294216 - DNA, 250 bp, Glycine max
gaccaacacaaacaatagtgcatagcgtttttcattgtgcattattcaatggccaccacagcagctctatccggaaccatggtgagcacctccttcatgaggaagcaacctatgacgaccaagagcctaaagacattccccaacgctctttttggtctgaaaggtggacgaggtggtcgtgtaacttgcatggcctcgtacaaggtgaagctcataaccccagaaggagaagtggagtttgaatgcccag

SEQ ID NO: 294217 - DNA, 267 bp, Glycine max
  unsure (1)..(267): unsure at all n locations
tgctttagactatggattaacagtcttggaatttccacttatgtcaataatgtttttgaggatgtcagaaatggatgggttctattagacagttcttgacaaggtttcagctggatccgtccacnggnagctggccacaaagcctcctataaagntgccgtttcggaaagttgagaactgcnaccaagtcataaagattgggaaggaactaaactttcattagtgaatgttggctggtantgntangntncaggggnnagcntnncc

SEQ ID NO: 294218 - DNA, 257 bp, Glycine max
  unsure (1)..(257): unsure at all n locations
atcagtggtgccccccaggataacaacataatgctgtggaatgctgtcatatttggtcctgatgatactccatgggatggnggcacgttcaagttgacactccaatttactgaggactatccaaataaaccaccgactgtacgatttgtgtctcgcatgtttcatccaaatatttatgctgatggaagtatttgtttggatatattacaaaatcagtggagtcctatttatgantgtggctgctatactcacatcta

SEQ ID NO: 294219 - DNA, 250 bp, Glycine max
  unsure (1)..(250): unsure at all n locations
gcttccgccaatgtcttcttcgaagagcgtttcgatgacgggtgggaaaatcgatgggttaaatcagattggaaaaaagatgagaacgtggctggggagtggaaccacacctctggtcaatggaatggagacgctaatgacnaaggtattcaaaccagtgaggattacagattctatgctatttcagctgagtaccctgaattcagcaacaagggtaagacactagtctttcaattttctgntanaccga

SEQ ID NO: 294220 - DNA, 257 bp, Glycine max
gaacgcagccaagaaaagaaaatcctcacccattttcttcgtagccaaacactctgaaattctcagttatgtcgcggcaagcgtatgtggatgatcacctactgtgtgaaatcgaaggtaaccacctcactcacgccgctatcatcggccaagacggaagcgtttgggctcagagcaccaacttccctcagttcaaacctgaggaaataactgccatcaataatgactttaatgagcctggatcacttgctccaact

SEQ ID NO: 294221 - DNA, 258 bp, Glycine max
gacacaccgtttgttctattcttaactcaacttctgctacccactctcttcttccaagtccaaccacgcttttctctacagtcatgggcaaggtcaagatcggaatcaacggatttggaagaattggccgtttggttgccagagtcgctctgcaaagagacgatgtggagctcgttgccgttaacgaccctttcattaccaccgattacatgacatacatgtttaaatacgacagtgttcacggacactggaagcatc

SEQ ID NO: 294222 - DNA, 257 bp, Glycine max
gactgcaaatcacttttctactttgagtcttcttgatccttctttttctccttgaactcaaacatggcagatgaggtggttctgctagatttctggccaagtccatttgggatgagggtcaggattgcacttgctgaaaagggtatcaaatatgagtacaaagaagaggacttgaggaacaagagtcctcttctcctccaaatgaacccggttcacaagaagattccggttctcatccacaatggcatacccatttc

SEQ ID NO: 294223 - DNA, 205 bp, Glycine max
  unsure (1)..(205): unsure at all n locations
gagagagtattggcgcttcatcaagatgggtatttctagggattccatgcacaagangcgtgccactggtggcaagaaaaaggcttggagaaagaagaganagtatgagcttgggcgtcaggcagcanacaccangttatcaagcaacaagacaatcaggaggattcgtgttagaggtggcaatgttaaatggagggcttgangc

SEQ ID NO: 294224 - DNA, 251 bp, Glycine max
  unsure (1)..(251): unsure at all n locations
cgtgttgagaccggtgtcttgaagcctggaatggtggtgacttttgcgccaactggactgacaactgaagtcaagtctgtggagatgcaccatgaatctcttacagaggcacatcctggtgacaatgtgggattcaatgttaagaatgttgctgttaaggatttgaagcgtggttatgttgcctcaaactcaaaggatgaccctgcaaaggaggctgnggacttcacagnnnaagtcatcatcatgaacca

SEQ ID NO: 294225 - DNA, 250 bp, Glycine max
ggcacaagtgagtatgttgatcgagataactagaaacagtgtgatgaaaatgaaggtccttgttttcttcgttgctacaattttggtagcatggcaatgccatgcgtacgatatgttccctctccgaatgaacactggctatggtgcccgtactccggaggtgaaatgcgcaagttggaggcttgctgtggaagcacacaacatctttggctttgagaccattcctgaagagtgcgttgaagcaacaaag

SEQ ID NO: 294226 - DNA, 259 bp, Glycine max
  unsure (1)..(259): unsure at all n locations
ggttgtgaatcaacataaatattccgttttgcgtttctctgcctaaaaggattgaaagatgggtcaagcactaggttgctatcaagttgatcagtcaaatgtggctatcaaggagcattttggaaaatttgatgatgtcctagaacctggatgtcattgcctgccttggtgtcttgggtaccagattgctggtagtttgtcactgcgtgtgcagcaacttgatgttcgatgtgagacganaaccaaggacaatgtcttt

SEQ ID NO: 294227 - DNA, 245 bp, Glycine max
gatcacaacatcatagtaagcactatagtaaaaaaaggacattcattcatctatggctacccttattgctcccagcaaccactctccccaagaagatgctgaagctctcagaaaggcttttgaaggatggggaactgatgagaacactgtcatagtaattttgggtcatagaactgtgtatcagaggcagcaaatcagaagagtttatgaggaaatttaccaggaggatcttgtgaagcgcctag

SEQ ID NO: 294228 - DNA, 243 bp, Glycine max
  unsure (1)..(243): unsure at all n locations
ggtgagtggaaaagacgccataagaaagagcaagtcgaaaagttcatctctccctctctctcacacatcccagccatgagcctcttcggtataggcagaaaccagagaacattccgcccgaaaaaaagtactccttctggaagtaagggncctcaacttagaaaacatattgatgccacgttgggtagtggaaatctgagggaagcagtaaagctacctcctggggaggatttaaatgagtgg

SEQ ID NO: 294229 - DNA, 247 bp, Glycine max
  unsure (1)..(247): unsure at all n locations
ggaattccagatcctcaatcggccagcaccaacagcatcggcggcgacagtcactctccgacaacaacacttccgcggcgaaaaatgtctctggtggcgaacgaggatttccagcacattctgcgtgtgctgaacaccaacgtggncgggaagcagaagataatgttcgctatgacctccatcaagggtattggaaggagattcgccaacatcgcttgcaagaaggccgatgttgacatgaacaaaa

SEQ ID NO: 294230 - DNA, 258 bp, Glycine max
ggagttcaacgagatggagcaaataaagcacagaatagttgaagtgaatggcataaaaatgcatgttgcagagaaaggagagggtccagtggtgttgttcctccacggcttccctgagctctggtactcatggcgccaccagattctctctctcagctccctcggctaccgcgccgtcgctcccgatctccgtggctacggtgacaccgaggcaccaccttcaatcagcagctacaactgcttccacatagtgggtga

SEQ ID NO: 294231 - DNA, 251 bp, Glycine max
  unsure (1)..(251): unsure at all n locations
gatggtaattgatcatggtttgttgtatgtatgtatgcagatccagatgcagaagtggtgtccctctcgccgaagacgttgttggaatcggatcgttatgtgtgtgagatctgcaaccagggattccagagggaccagaaccttcagatgcataggaggaggcacaaggtgccatggaagctactgaagagggagacaccagtggtgaggaagagagtntttgtgtgtcctgagccaacttgcttgcacca

SEQ ID NO: 294232 - DNA, 251 bp, Glycine max
ggcagcagttgagaggaggcactgtggcagaagtcctaggagtgtaaaacagagacgcaaaatgaagacgatcttgtcgtctgagaccatgaatattcccgacggcgtgagcatcaaggttcacgctaaggttatcgaggttgagggccctcgtggaaaactcgtgcgagacttccaccatctgaacttggacttccaacttattaccgacgatggcggtaaaaggaagctcaagattgattcttggtttg

SEQ ID NO: 294233 - DNA, 244 bp, Glycine max
  unsure (1)..(244): unsure at all n locations
atagancaaaaactgaaaacccctggttcgtttttggtggctcatatgctggagcactcagtgcatggttccgtctcaagtttccccatttaacatgtggaagtctggcaagttctgcagttgttcttgctgtttataacttcacagaatatgatcaacagattggtgagtcagcaggtgctgaatgtaaagcagtattacatgaaactactcaactcattgagcacaaacttgcaaccaatgg

SEQ ID NO: 294234 - DNA, 250 bp, Glycine max
  unsure (1)..(250): unsure at all n locations
gatagctgagagagaaaggaaaggttaactaagaagcaatacttcaatggccacccttgttgttcataaccaaacttcttctgctcaagatgctgaggctctccaacaggctttcaaaggatggggggctgatgacaaggccattatagcaatactgggtcacagaaatgttcatcagaggcaagaaatcagaaaagcttatgaggagatttaccaagaggatctcatcaaacgncttgagtccgagatc

SEQ ID NO: 294235 - DNA, 258 bp, Glycine max
ggaagaaagagcaagtcgaaaagttcatctctccctctctctcacacatcccagccatgagcctcttcggtataggcagaaaccagagaacattccgcccgaaaaaaagtactccttctggaagtaagggagctcaacttagaaaacatattgatgccacgttgggtagtggaaatctgagggaagcagtaaagctacctcctggggaggatttaaatgagtggctagctgtcaacactgttgatttcttcaaccagg

SEQ ID NO: 294236 - DNA, 242 bp, Glycine max
aaagagacccggaaagggtgggaaccgcttttggaaatccattgggcttggatttaagactcccagggaagccatcgaaggaacctacattgacaagaagtgccccttcactggcaatgtttccatccgtggccgtatcttggctggaacatgtcacagtgctaagatgaacaggactattattgttaggaggaattatctccatttatcaagaagtaccagaggtacgagaaaaggcactc

SEQ ID NO: 294237 - DNA, 260 bp, Glycine max
  unsure (1)..(260): unsure at all n locations
ggaancnaagcaagccctanctncgcangcattcgtgaganaactacanattcntnnntcnaggcactctnnntcgtctcntttcctaatccnaatngatctatngctgncaaatacttctncaacaggtgcntgctnttccgttcntcgctttgntanngagtctgcccctcctgcccttnagggagacgagatgctgaagaaactttttgtggcggtgaanagcaaatttgagnccgccataggaatattgangaagg

SEQ ID NO: 294238 - DNA, 256 bp, Glycine max
  unsure (1)..(256): unsure at all n locations
ggcacaagtgagtttgttgatcgagataactagaaacagtgtgatgaaaatgaaggtcctgttttcttcgttgctacaattttggtagcatggcaatgccatgcgtaacgatatgttccctctccgaatgaacactggctatggtgcccgtactccggaggtgaaatgcgcaagttggaggctgctgtggaagcactnaacatcttgctttgagaccatcctgaagagtgcgttgaagcaacaaaggaatacatcc

SEQ ID NO: 294239 - DNA, 237 bp, Glycine max
  unsure (1)..(237): unsure at all n locations
catcaaaaccataacttaccaaaagtataccctaaatatatgggatgttgggggccagaaaacaataagatcttactggagaaactactttgagcaaacagatggtttggtttgggtggttgacagttcagatctcagaaggttggatgattgcaaattcgagctcgataaccttctcaaggaagagaggatnnggagcatctttactgatacttgcaaataaacaggacataaaag

SEQ ID NO: 294240 - DNA, 238 bp, Glycine max
ggtgtggtagtgtggcagcgacacgtatcaacttcaataatcgcatcgcagaagcagtttccggtgcatctcatcgtctccgaaaatgaacgacgcagatgtctcgaagcaaatccagcagatggtgcggttcatccgccaggaagctgaggaaaaggccaacgagatctctgtctccgccgaagaggaatcaatatcgagaagctgcagttggtcgaagccgacaagaagaagatca

SEQ ID NO: 294241 - DNA, 246 bp, Glycine max
ggaagagaaaagaaaagaatcgagtgattttcgtttgcgttgctgttgcgactgagtgagtgaagatggcgtgcttgcacgaccacagttgcgaagaccatgactgttcctctaactggtctctctacaaacacatcgacctctccaaggtaactgctttgaatgaggcaaatccaggaagtgttaagtcagttttcaaattgggaagagcgtctggattctctggggttcacttggaaagcaatg

SEQ ID NO: 294242 - DNA, 228 bp, Glycine max
  unsure (1)..(228): unsure at all n locations
gtagttggaaganctggatctaaagagaaggnggatctgctgacaaataaatttggatttgatggaggttttaactacaaggaagagcctgaccttgatgcagctttgaaaaggcactttccagaaggcattgatgtttactttgagaatgttgggggcaagacacttgacgccgtaacctgaacatgagagtccgtggtcgcatacccgtctgtggaatgatctcac

SEQ ID NO: 294243 - DNA, 240 bp, Glycine max
ggcacagagcaatactgcaatagagaaagaggcagatagaaaaaagagctgagttttgagttcaaaagatgactaacttcccagtgatcaacttggagaagctcaatggtgaggagagaaacgacaccatggagaaaataaaggatgcttgtgaaaactggggattctttgagctggtgaatcatggcataccctgacttattggacactgtggagaggttgaccaaagagcactacagg

SEQ ID NO: 294244 - DNA, 232 bp, Glycine max
ggggctcacaattggtgccatgctggaagagattcagagtctttataggcagcaccaccaaccatgctttctttatctctccagtgaagttataaagatatttggttctgatccatcttgtgctgactacctgaaaaatttgattgaggcactcttccagcacacaacactccttctcacaaatatcaggaattcacagcccggcctgatatagcagatgattgttttttgt

SEQ ID NO: 294245 - DNA, 234 bp, Glycine max
ggatgcaaaagttagtagtagtgaagaaaatgaaagtccttgttttctttgttgctatagttctagcagcatggcattgccatggctcagaccatgaccatgaccatggccacacctaccaaattttccctctgagaatgaaaactggccatggtggccactacattccggaggtatcatgccaaagtggaggctggtgtggaagcacacaacgtcattgactggaaaaccgtt

SEQ ID NO: 294246 - DNA, 235 bp, Glycine max
gacacaccgtttgttctattcttaactcaacttctgctacccactctcttcttccaagtccaaccacgcttttctctacagtcatgggcaaggtcaagatcggaatcaacggatttggaagaattggccgtttggttgccagagtcgctctgcaaagagacgatgtggagctcgttgccgttaacgaacttcattaccaccgattacatgacatacatgtttaaatacgacagtg

SEQ ID NO: 294247 - DNA, 241 bp, Glycine max
agcacaagtgagtttgttgatcgagataactagaaacagtgtgatgaaaatgaaggtccttgttttcttcgttgctacaattttggtagcatggcaatgccatgcgtacgatatgttccctctccgaatgaacactggctatggtgcccgtactccggaggtgaaatgcgcaagttggaggcttgctgtggagcacacaacatctttggctttgagaccattcctgaagagtgcgttgaag

SEQ ID NO: 294248 - DNA, 232 bp, Glycine max
  unsure (1)..(232): unsure at all n locations
aaggaaagtaataatgatagtgttagtgttggtggtttgcttggggaatgtgacatctttgatgggaaatgggtgagggatgaattcaagccttactatccattggggtcttgtccaaatgttgatagggattttgattgccatcttaatggaaggccttgnagtgattatgtcaagtggaaatgcagccaaatgggtgtgacattccaagtttgaatgcaactgattttct

SEQ ID NO: 294249 - DNA, 244 bp, Glycine max
  unsure (1)..(244): unsure at all n locations
ggagagaagagagatggatccagacgcgttggcaaaggcattcgtggagcactactacagcaccttcgacaccaaccggaacggtttagcgaatctgtatcaggagggttccatgctgaccttcgaagggcagaagatccagggcgcttccagcatcgtcgctaagctcacttccctccctttccagcagtgccccactccatcnccaccgtcgactgccagccctccggtgtcaacgctggca

SEQ ID NO: 294250 - DNA, 232 bp, Glycine max
  unsure (1)..(232): unsure at all n locations
ggaggtgtgattgtggattctggaaccgcgataacttcggttgcggactcaggcctacaactcggtgcgcgacgctttcaagaggaagacttcgaacctgcgtcccgcggagggggttgcgcttttcgacacgtgctacgacctgtcgtctctgcagagcgtgcgggtgccgacggtgtcgttcacttcannggcgacaggnnngccggcgctgccggcgaagaattacttg

SEQ ID NO: 294251 - DNA, 227 bp, Glycine max
gagagaaagagagagaaagatgtcgaagcgtggtcgtggtggttcggcggggaacaagttccgcatgtcgctgggtcttccagtggcggcgacggtgaactgcgccgacaacacgggggcgaagaacctctacatcatttcggtgaaagggatcaaaggccgtttgaaccgtcttccctcgcctgcgttggcgacatggtgatggccaccgtgaagaagggaaaacc

SEQ ID NO: 294252 - DNA, 250 bp, Glycine max
ggcggaatattagggttttaagggtgggcgaggtagccagagagtgatacaatacagagtgcgttgttgctccttcgccacaactccctgccaacatgggtatctccagagattctatgcacaagaggcgtgccactggtggcaagaagaaggcatggaggaagaagagaaagtatgagcttggtcgccagcctgctaacaaagctgtcaagcaacaagacagtcaggaggatccgggttagaggtggaa

SEQ ID NO: 294253 - DNA, 236 bp, Glycine max
  unsure (1)..(236): unsure at all n locations
gactcaccacttcaaaacactcataacacaaagcacaaagcaaagctcatccttgagttaaaaaatggcagcagcttcttccatggctctctcatccccatccttggctggcaaggccgtgaagctgggcccatcagccccagaagtgggaagggtgagcatgaggaagaccgtcaccaagcaggtcnctcaggaagcccatggtacggcccagaccgagtcaagtacttgggccc

SEQ ID NO: 294254 - DNA, 232 bp, Glycine max
  unsure (1)..(232): unsure at all n locations
ggagaaagagaaagagagaattcgtaaaccctaatttcggaaagatcggcgatgactgcctccaaggatcgcgagancttcgtctgcatcgccaaactcgccgagcaggccgagcgttacgaagagatggtggaatcaatgaagaacgttgcgaatctcgacgttgaactgacggtggaggagcggtttgccgncctgttgggtnnngaatgtgattggtgctcgcagacgt

SEQ ID NO: 294255 - DNA, 229 bp, Glycine max
tgttgacaattctggcctgctctttgatgatcatgcaaggacagcgttgggattttatgctcttaagagtaatggagaacctgaattcatgttttaccgaaatccaagttctgatgtgctccttcgtcctgatgaaattgatatggacctcataaagaaggccacaatatttcattatggttcaaagtttgattaaggaacctgtaggtcagctcatcttgctgcaatg

SEQ ID NO: 294256 - DNA, 241 bp, Glycine max
  unsure (1)..(241): unsure at all n locations
gaccactaaaatatctctctattattctcgttttcaatatgcagatcttcgtcaaaaccctaaccggtaaaacgattacgctagaggtcgagtcctccgacacaatcgataacgtgaaagctaaaatccaagacaaggaaggcattccaccggatcancagcgtttgatcttcgccggtaaacaactcgaagagcagaactctcgccgattacaatatccagaaagaatcgacgctccacc

SEQ ID NO: 294257 - DNA, 229 bp, Glycine max
  unsure (1)..(229): unsure at all n locations
ggagcgaagaagatattagggtttttgagtgcggtgcggcgatcctagcactctcttctgcagctttcgccgacagcttcattcaccatggctgagcaaaccgagaaggcttttttgaaacaaccaaaagtgtttctcagctcgaagaaaactgggaagggaaagagacccggaaagggtggaaccgcttttggaaatccattgggcttggatttaagactcccangga

SEQ ID NO: 294258 - DNA, 217 bp, Glycine max
gacaccaaaacaattttcaacactcaattaccattccataaccctaaatctcctctttgtttccgagtcagagagcaatggcacgtaccaagcaaaccgctcgcaagtccaccggcggaaaggcgccgaggaagcaattggcgactaaagccgctcgcaagtccagctcggccaccggcggagtgaagaagccccaccgcttcaggcccggaacggt

SEQ ID NO: 294259 - DNA, 222 bp, Glycine max
gatgatggactaagaactctgaacattagccaatgcacagcactcaccccttctgctgtgcaggctgtgtgtgactcatgcccttccctccacacctgttctggaagacactcactcatcatgagtggttgtctgaacctgacttctgtgcattgtgtttgtgctggccaagcacactgctatcactctccctcatgcagctcattgagccagaggggttga

SEQ ID NO: 294260 - DNA, 231 bp, Glycine max
gagagtggtggagtgtgcaaaagagcgtcgtagtcgcaaccctaatcagaagaagcgcagttcaagcgagtgacagccaccagccatgggtcgtatgcacagccgcggtaagggtatatcctcttctgctttgccctacaaaaggacacctcctagctggctcaagatctcttcgcaagatgtcagaaaatatctgcaagtttgcgaagaaaggtttgaccccgtctcaga

SEQ ID NO: 294261 - DNA, 223 bp, Glycine max
gagattttcaagtaggccttcctggaatagatggtttatcaactgaacaaagaaagagactcaccattgcagtagaattggttgccaatccttctatcatctttatggatgagccaacctccggccttgacgctagagctgcagcaattgttatgcgtgctgttagaaatacagcgatacagggagaactattgtctgcacaattcatcaaccaagcattgac

SEQ ID NO: 294262 - DNA, 263 bp, Glycine max
gaacacgcggcttccgccggaggtgaaccgcgtgctgtacgttcggaaccttcccttcaacatcaccagcgaggagatgtacgacatctttggcaaatacggcgccattcgccagatccgcatcggcaccaacaaggacactcgcggaaccgctttcgtcgtctacgaggacatctacgacgccaaaaccgccgtcgaccacctctccggcttcaacgtcgccaaccgctacctcatcgttctctattatcaacaagcggagg

SEQ ID NO: 294263 - DNA, 264 bp, Glycine max
  unsure (1)..(264): unsure at all n locations
gagaacagagtgtgataatagtaagacagagcacctactcactcgtaaatggcgaggaagaagatcagagagtaccactccaagaggctnctcaaggagcatctcaaacgtctcgccttctatcgacctccaaatcctctcagctcaggtgacagaatctacggatttcactgagancgacagaccagcatccatggctttcgtcaaccagattggtcgtcaagccagacatgctgtttcgggaancccggcaagagtgggcta

SEQ ID NO: 294264 - DNA, 260 bp, Glycine max
agggaaatattttgaagagatcagccaggacactgggaaatatgtctttggggttgaggacactttgaaggcactggagatgggtgctgtggaaacactcattgtatgggaaaatttggatattaataggtatgtgctgaaaaatggtatcactggtgagattgtcattaagcacttgaacaaggaacaagaggctaatcaaagcaacttccgtgatttggccacttctgcagagttggaagttcaggagaagatgccct

SEQ ID NO: 294265 - DNA, 255 bp, Glycine max
gattcaacggggaggtaccaaggggacaacgagttgcaactcgagcgagtcaacgtctactacaatgaagcgagttgcggaaggttcgtgcctagggcggtgctcatggatctggagccagggaccatggacagcgtcagatctggtccctacggtcagacttttccggccagataacttcgtctttggacagtccggcgccggaaacaactggggccaaaggtcatacaccgaaggcgctgagttgattgactc

SEQ ID NO: 294266 - DNA, 252 bp, Glycine max
ttcttatcattgattcgaccactggtggttttgaagctggtatttccaaggatggacagactcgtgaacatgctctgctttcattcacccttggtgtgaaacagatgatttgctgctgtaacaaaatggatgctactacacccaagtattccaaggccaggtatgatgaaattgtgaaggaagtctcttcctacttgaagaaagtaggatacaaccctgacaagattcctttgttcctatctctggttttga

SEQ ID NO: 294267 - DNA, 252 bp, Glycine max
  unsure (1)..(252): unsure at all n locations
gtattgtggaaggaagttttcattgaagacagtattaatgttggctgatcaaatgatcactagaatagaatatgtgcattctaaaggatttttacacagggatattaaacctgataactttctcatgggacttggtcgaaaggccaaccaggtttacatnattgattttgggcttgcaaaacgatatcgggattccactaccaatcgccacatcccttacagggagaacaaaaacttaacgggtactgctcg

SEQ ID NO: 294268 - DNA, 262 bp, Glycine max
ggaaattgaaatatagatcatcataagatattaagataaggacccatttcctcttctaagctatataatgctcgtctagcctacccactacaagcaacattgctaaccattctcttcactttaaagttacatagtttttcattgttttacttaatctacaatggctgcttcaacaatgactctctcttcatcatcattggctggccaagctatcaagcttgccccctccacccctgagcttggtgttggaagggttagcatg

SEQ ID NO: 294269 - DNA, 249 bp, Glycine max
aaggtgcatggatggatgaagtctttgctcgtagtcgtgtgttatcgcgcgatggtacctcagcaagattgcctgttgctcacatggtgtgcaatcaaactcctccagtaggaaacaagccaagtctaatgacattccgtgaggttgagattgttttccatgaatttggtcatgcacttcaacatatgcttactaagcaagatgagggtctggttgctggtattagagggatagagtgggatgctgttg

SEQ ID NO: 294270 - DNA, 253 bp, Glycine max
  unsure (1)..(253): unsure at all n locations
agnggatctctggagatgctttganngntctgtacaagtcatttgtgtcanagtacccaattgtnncaattgangatccatttgaaccaggatgactgggagcactangcnaagctaactgntgaggttggagccatgtacaaattgttggtgntgatctcttggttaccaaccccaagagggctcagaaggcaattgatactaaagcntgnaatgcncttctnctcaaggtnaaccanattggttctgtgnc

SEQ ID NO: 294271 - DNA, 225 bp, Glycine max
gggcacaagtgagtttgttgatcgagataactagaaacagtgtgatgaaaatgaaggtccttgttttcttcgttgctacaattttggtagcatggcaatgccatgcgtacgatatgttccctctccgaatgaacactggctatggtgcccgtactccggaggtgaaatgcgcaagttggaggcttgctgtggaagcacacaacatctttggctttgagaccatcc

SEQ ID NO: 294272 - DNA, 256 bp, Glycine max
  unsure (1)..(256): unsure at all n locations
ggtgctggaagaagaatctgcccaggaagcacctttggtttagcaagtgttgagctgatacttgcatttttgttgtatcactttgattggaagcttccaaatggaatgaaaaatgaggactttgncatgactgaggaatttggagtgactgttgcaagaaaagatgatatatatttgatacctgtcacttataatccttcctgggaaatggtgcagacagtagggaagtgagtagtgcaagcaaagaaggctgagt

SEQ ID NO: 294273 - DNA, 251 bp, Glycine max
ggtctcgtggaagtgtaagcaagcaaaaccctagcggcgcctgctttctttgttcgtgttttgcatcaggatggagtctcaggtgaagcacgcacttgttgtcaaagttatgggtcgtactggatccagaggacaagtgacccaggttagagtgaagtttttggatgatcagaaccgtcacatcatgaggaatgtgaaaggacctgtgagagaaggagacattctcaccctactcgagtctgaaaggaagc

SEQ ID NO: 294274 - DNA, 263 bp, Glycine max
gagggtttttgagtgcggtgcggcgatcctagcactctcttctgcagctttcgccgacagcttcattcaccatggctgagcaaaccgagaaggcttttttgaaacaaccaaaagtgtttctcagctcgaagaaaactgggaagggaaagagacccggaaagggtgggaaccgcttttggaaatccattgggcttggatttaagactcccagggaagccatcgaaggaacctacattgacaagaagtgccccttcactggcaat

SEQ ID NO: 294275 - DNA, 242 bp, Glycine max
gacaagtttgttgagatagctagaagcaataagatgaaaatgaaagtgcttgttttgtttgttgctacagttttggtagcatatgaatgccatggctcagactaccagaagttccctctccaaatgaaaactgggtttggtgggcaatacagcaatgaggtggcatgtgccagttggaggcttggcgtggaagcaaacaacgtagtcaagtggcaaactgttcctgcagcttgcggagagta

SEQ ID NO: 294276 - DNA, 248 bp, Glycine max
  unsure (1)..(248): unsure at all n locations
gagtgcacaagtgagtttgttgatcgagataactagaaacagtgtgatgaaaatgaaggtccttgttttcttcgttgctacaattttggtagcatggcaatgccatgcgtacgatatgttccctctccgaatgaacactggctatggtgcccgtactccggangtgaaatgcgcaagttggaggcttgctgtggaagcacacaacatctttggcttganaccattcctgaagatgcgttgaagcnnac

SEQ ID NO: 294277 - DNA, 248 bp, Glycine max
gagtgagagagagagaaggcaagatgtcgaagagaggacgcggtggttcggcggggaacaagttccggatgtcgctgggtctgccggtggcggcgacggtgaactgcgccgacaatacgggggcgaagaacttctacatcatatcggtgaaagggatcaaagggcgtttgaaccgtctcccctcggcttgcgttggcgacatggtgatggccaccgtgaagaaggggaaacccgatctgaggaagaag

SEQ ID NO: 294278 - DNA, 244 bp, Glycine max
ggggttttgggtcctagaacaacatatgtgcttgctctaaaagacttccctggcacccatgaatttcttctgcttgatgaaggaaaatggcagcatgtcaaagagaccacagaaattggtgaaggaaaactgttctccccaggaaatttgagagccacatctgacaaccccgattatgctaagttgatcgattactatgtcaatgaaaagtacacattgagatacactggaggaatggtgccag

SEQ ID NO: 294279 - DNA, 235 bp, Glycine max
agaagagtccaagaaattgattgtggtggattttactgcttcttggtgcggtccatgccgtttcattgccccaattcttgcagagtttgctaaaaagttgccgaatgtcaccttcctcaaggtggatgtggatgaattggagactgtttccaaggagtggggaattgaggctatgccaaccttcctgttcttgaaagaaggcaagctggtggacaaggttgtgggtgccaagaaa

SEQ ID NO: 294280 - DNA, 251 bp, Glycine max
  unsure (1)..(251): unsure at all n locations
ggcnacaaactcggagatctcagattcgacgcgccaaaccatgtcgaaggcgcgtgtctacacagatgtcaatgtccttcgccctaaagagtattgggattacgagtctctcacccttcaatggggtgatcaagatgattatgaggttgtgcgaaaagtgggcagangggaaatatagtgaagtttttgaaggcataaatgtcaatagcaatgagcgctgtataatcaagattctgaaacctgtcaagaaa

SEQ ID NO: 294281 - DNA, 244 bp, Glycine max
  unsure (1)..(244): unsure at all n locations
agcgtcggtttggtccttccgacaaattaagttactggtacaattgcgattccaactattggagtgctgtctacaagcgcacctatggtaaagatttcantttaaagntggttatgattcagagattcgccttggctgggcatctctttgggctggagatgaaggtgggaaagccaaaacagctccgatgcagatgaaagttcaattcatgctacaagtgccacaggacgacataaaatcttct

SEQ ID NO: 294282 - DNA, 237 bp, Glycine max
  unsure (1)..(237): unsure at all n locations
ggtgatttgagaggatcgtgagngggacggtagcagagattccgtgagttgcaaaaatgaaaacaattctttctgcagagaccatgaacatcccggacggcgtgagcgtcaaggttaatgccaaggtcatcgaagttgagggcccccgcggaaaattggtgcgagacttcaagcacttgaatctcgattttcagctcatcactgacgaaaacggtaaaaggaagctgaaggtggagg

SEQ ID NO: 294283 - DNA, 235 bp, Glycine max
  unsure (1)..(235): unsure at all n locations
taagaagcagtttgttaccttcatgaagaggtttatcaagaatttgactcccaagctcgatgcagagcaacaggagttgtttaagaagcacatcgagggagcaactaaatacctgctctctaagattacagatttccaattttttgttggtgagagcatnggtgatgatgcttgcttggtctttgcctactacaaggacggcgctgctgatccaacattcctgtactttgcatat

SEQ ID NO: 294284 - DNA, 227 bp, Glycine max
  unsure (1)..(227): unsure at all n locations
acaaaacaagtgttncgaatagattatcctaagtctttgggaatagtgctgcaatggcttcaagtcagaaggaggtgacccttttgggagctactggaagcccatttgtgtgcagggttcatattgccctcaagttgaagggagttcaatacaaatatgtcgaagaaaatttgaggaacaagagtgaactgcttctcaaatccaacccattcacaagaaggttccag

SEQ ID NO: 294285 - DNA, 244 bp, Glycine max
gcattaaaggctgttgggacagggttggggactgcagctgtaattgtaatggataaatctacggatgttgtggatgctattgcaaggctttcctacttctacaagcacgaaagttgtgggcagtgcacaccatgcagggagggaactggttggctttggacaatcatggaaagaatgaaagttgggaatgccaagctagaagaaattgatatgcttcaggagttgactaaacaaattgaagggc

SEQ ID NO: 294286 - DNA, 230 bp, Glycine max
ggttttgattagggtttgtcattagcacttcttcttttcacactgccgctgcaacaatggcttcagagaagaaactttcgaacccaatgagggagataaaagtgcagaagctcgttctcaatatctctgttggcgagagtggagatcgtctcaccagagccgccaaggtgttggaacaacttagtggccaaaccccagtgttttccaaagcaaggtacactgttcgttcc

SEQ ID NO: 294287 - DNA, 211 bp, Glycine max
  unsure (1)..(211): unsure at all n locations
ggagagagagaaaganaagtgtgtagttggtgaannttttgagaagaatatggaacgaagtggtggaatggtaacggggtcgcatgaaaggaacgaacttgttagagttagacacggttctgacagtgggtctaaacccttgaggaatttaaatggtcagatttgtcaaatatgtggtgacaccattggattaacggctactggtgacctc

SEQ ID NO: 294288 - DNA, 255 bp, Glycine max
  unsure (1)..(255): unsure at all n locations
ctggtctcatcaaagccctaaccactgatgttgaagatttttacaaccaatgtgatcctgagaaagagaatttgtgcttgtatggctttcccagtgagcagtgggaagtaaatttacctgctgaagaagtaccaccagagctnccctgagcccgtgctgggcattaactttgctagggatggcatgcaagaaaaagactggctatctttagttgctgttcatagtgatgcatggttacttgctattgcattctat

SEQ ID NO: 294289 - DNA, 251 bp, Glycine max
  unsure (1)..(251): unsure at all n locations
gcttccttaagctccttagtgctgctccttgcagctctaattctatcccctcaagttcttgcaaactatgagaatcccccagtgtacaagcctcccactgagaaaccaccagtttatnagcccccagttgagaagcctcctgtttacaancctccagttganaangcnccantttataagcctccagtagagaagccaccagtgtacaagcccccagttgagaanccnccagtgtncaagcccccagttga

SEQ ID NO: 294290 - DNA, 251 bp, Glycine max
gtttgctatgatttgatccgggcagacattgctcttgaattggcctggatgaacaatatgattgactttgccttcccatatctcctgcagtttatccgtgagtacaccggcaaagttgatgaactggtgaaggataaaattgaagcgcagaaccaagtgaaggctaaagaacaagaagagaaggaagtaattgctcaacagaatatgtatgctcagttgttgcctcttgctttgcccgcaccaccaatgcc

SEQ ID NO: 294291 - DNA, 262 bp, Glycine max
  unsure (1)..(262): unsure at all n locations
atccttcactactacaccaaaaaaattaatatatagcattcttctagcctaagagaaaataaaccaatattattccacaaaacaaattaaanttcgtgagagtttaatcaatttgatacacgtacccttatggccaaagaaggtcttggacttgaaatcaccgagctaaggttgggtctacccgatgcggatntgtaactgtggtcaataagaatgagaagaagagggccttctcgcaaattgatgatgaaaatagctcctc

SEQ ID NO: 294292 - DNA, 256 bp, Glycine max
  unsure (1)..(256): unsure at all n locations
cttgaatgtaggtgaaggttgtcctacgtgcagatgtttcagctgcaacatatgataaagttgcaatcatatcagggggaggaagtggccatgagcctgcccatgctggatttgtgggagaaggaatgcttaccgcagcaatttgtggagatatattttcttctccacctgtcgactcaattctanctgggatacgagctgtgactggtcctaagggatgtcttctggttgtaaagtgttcgaatttgggtgttga

SEQ ID NO: 294293 - DNA, 256 bp, Glycine max
  unsure (1)..(256): unsure at all n locations
cgcacccacttatatctcttaaattagttttccaatgcagaaagcagggtncggtgntcactctcgaagagcgacgtgccctcgaaggcgaaatcgttcgcaaatgcctcgcccgcaacgaacagcagtgttcctttgttgagcatcgcaactacaaaattgtttatcggcgctacgcctctttgtttttcctcgatggnntngtagcttcgcgccactggcttttcaaccaagcgcgatgaccaattgtgcgaat

SEQ ID NO: 294294 - DNA, 252 bp, Glycine max
  unsure (1)..(252): unsure at all n locations
acttcnnnnnnnncnnnctnngncgcggacggaggaggagcactctccccgtcgatctcttccaatgctgacacgtgctcattattctcctccgaccatttccgaatgttccagttcaaggtgcggaactgtccacgtggcaggtcccacgactggaccgagtgtccctacgcccaccccgccgagaaggctcgccgccgtgacccccgcaagtaccactactcaggcacctcctgccccgattaccggaag

SEQ ID NO: 294295 - DNA, 261 bp, Glycine max
  unsure (1)..(261): unsure at all n locations
aacacaagaacactctcttgaacattcatggatccagtgagcgtgtggggtaacacgcccttggcgacggtggatcccgagatccatgacctcatcgagaaggagaagcaccgccaatgccgcggcatcgagctcatcgcctccgagaacttcacctccttcgcagtcatcgaggccctcggcagcgccctcaccaacaaatactccgagggcatgcncggnaaccgctactacggcggcaacgaattcatcgaccagatc

SEQ ID NO: 294296 - DNA, 259 bp, Glycine max
  unsure (1)..(259): unsure at all n locations
gtagatttgagaggtaagaagagaaggagagagcaaagcataatttaatatcggggatgccattggctcgtatccaattgtgtcatggnnnnatactgganttgttatgaacttctacaaggaatcatgccctcaggctgaagacatcatcaaagaacaagtcaagcttctctacaagcgccacaagaacactgctttctcctggctcagaaacatcttccatgactgtgctgttcagagttgtgatgcttcactgttg

SEQ ID NO: 294297 - DNA, 249 bp, Glycine max
cgagtacaagccagagcttgatattatttccaacgctagctgcacaaccaactgccttgctccactcgccaaggttatcaatgacaggtttggcattgttgagggtttgatgaccactgttcattccatcactgctacccagaagactgttgatgggccatcagccaaggactggagaggtggaagagctgcttcatttaacatcattcctagcagcactggagctgccaaggctgttgggaaagtcct

SEQ ID NO: 294298 - DNA, 258 bp, Glycine max
cttgctagttgccacactacaccgatatttccaccaaacccgtttgcgttgttgtttgcgaataaatggcgactaagaggagcgtgggaacgttgaaggagggtgatttgaaggggaagagggtattcgtgagggtcgatctgaacgtgcctttggatgacaaccttaacatcaccgatgacactagagtccgtgctgctgttcccaccatcaagtacttgactggttatggtgctaaagtgatcctttctagccatt

SEQ ID NO: 294299 - DNA, 237 bp, Glycine max
caaccatcgatctcaattttcaaccttaacctctaagaatgtcttacgcttatctcttcaaatacatcatcatcggtgacaccggagttggaaagtcttgtcttctacttcaattcacggacaagcgctttcagcccgtccatgacttgaccatcggtgttgaatttggtgccaggatgatcacaattgataacaagccaatcaagttgcaaatatgggatacggctggtcaagaat

SEQ ID NO: 294300 - DNA, 258 bp, Glycine max
  unsure (1)..(258): unsure at all n locations
gtctttgctctcacataacagaaaatgagggggggcttatggcaactcgggcaatcaatcactcgccgtcttgcccagggtgataagaaggctgttgctcgtaggtattttgcctcagatgctgagctgaaaaagacagtcgtttatgacttccatgttgctaatggagggaagatggtgccanttnactggatggagcatgccaattcaatataaggactcaattatggactcaacccttaactgtagggagaatgg

SEQ ID NO: 294301 - DNA, 251 bp, Glycine max
  unsure (1)..(251): unsure at all n locations
ccacntatatctcttaaattagttttccaatgcagaaagcagggtacggtggcgatggaatatacaggtctctaaggccttgtttggntctcccaaatatgcctcgcccgcaacgaacagcagtgttcctttgttgagcatcgcaactacaaaattgtttatcggcgctacgcctctttgtttttcctcgttggagtcgacgatgatgagaatgagctggcaattttggaatttatacatctcttggttga

SEQ ID NO: 294302 - DNA, 261 bp, Glycine max
gttgattcggatctagagtcttcagtttctcctcgttgttcttcgctttcctgttttcaatttcgattctttcgttaatttaataagatgtttgggagggcaccgaagaagagcgataatacgaggtactacgaaatcctcggcgtctccaagaacgcttcgcaggatgatctgaagaaggcttacaagaaagccgccattaagaatcaccccgacaagggcggtgatcccgagaagtttaaagagctggcgcaagttatg

SEQ ID NO: 294303 - DNA, 257 bp, Glycine max
  unsure (1)..(257): unsure at all n locations
aagcactatagaaaaaacgacattcattcatctatggctacccttattgctcccagcaaccactctccccaagaagacgctgaggctctcagaaaggcttttgaaggatgggggactgatgagaaaactgtcatagtaatattgggtcatagaactgtttatcagaggcagcaaatcngaagagtctatncaggaaattttccaggaggatcttgtgaaacgcctagagtctgagatcaaaggagactttgagaaag

SEQ ID NO: 294304 - DNA, 262 bp, Glycine max
cggacgaagagcaccatttcgagtccaaggcagacgccggtgcctccaaaacctaccctcagcaagccggtaccattcgcaagaacggctacatcgtcatcaaaggacgcccctgcaaggttgtggaagtttcgacttccaaaactggaaagcacggtcacgccaagtgccactttgttggaattgatattttcactgccaagaaacttgaggatattgtgccctcttctcacaactgtgatgttcctcatgtgaatcgtac

SEQ ID NO: 294305 - DNA, 259 bp, Glycine max
  unsure (1)..(259): unsure at all n locations
ccgattcgtactgatggtgaacaagcaaggccaaactcgtcttgctcaatattacgaatacctcactctcgaagagcgacgtgccctcgaaggcgaaatcgttcgcaaatgcctcgcccgcaacgannnggnaaacggacggcgggcgcacgcgtcgcttctagcccggattctgacttagaggcgttcagtcataatccaacgcacggtagcttcgcgccactggcttttcaaccaagcgcgangaccaattntncgg

SEQ ID NO: 294306 - DNA, 256 bp, Glycine max
  unsure (1)..(256): unsure at all n locations
tcccaaacgttcaaatccctacctgggacgcggacggaggaggagcactctccccgtcgatctcttccaatgctgacacgtgctcattantntnntagatcaaagactcccccaccacaaagaacccaaggagtttgtctcgttggaccaacttgctgaacttggagtccttagctggaaattagatgctgataaccatgaaaatgatccagagctganaaagattcgtgaagagcgtggcnacacctacatggtt

SEQ ID NO: 294307 - DNA, 255 bp, Glycine max
catctgcttcccctaggcaaccttcttcttacttctctccgcttcttatctccagattgctggggcggaagcacaaccgttgactagtctcaagcttaactctcatattcttcaggagtctactgctaaagagattaatgaaaatcccgaggcaggatgggaggctgctataaatcctcgtttctccaattatacagttgaacaatttaagcgccttcttggagtcaaaccaatgcctaagaaggaacttagaag

SEQ ID NO: 294308 - DNA, 245 bp, Glycine max
agaaagcttatcggtgctccaatttacattgaatgtagttcaaaaacacaacagaatgtgaaggctgtttttgatgcagccatcaaggtagttctccagcccccaaagcagaagaaaaagaagagaaagggacaaaaggcctgttccattttgtgatcttcagttcttaatatagtagtttgtggaggatgacatgactgtagtcttcatcattctatatcttatactatttccaacctagatga

SEQ ID NO: 294309 - DNA, 249 bp, Glycine max
  unsure (1)..(249): unsure at all n locations
tttttcctcgtcatcttcgctggaatcatgtcaggtctaaccctaggtctcatgttctctcggcctcgttgacctcgagattcttcaacgcagtgnttctccatccgagaagaaacaagcagcggttatacttcctgtggttcaaaagcaacaccagctgctagtgactctgcttctgtgtaatgctgctgccatggaggcccttccgatatacctagacaagatgttcaatcagtatgttgctatcat

SEQ ID NO: 294310 - DNA, 243 bp, Glycine max
  unsure (1)..(243): unsure at all n locations
tgcagaccgagctagctagctagcaagcaagcacagagatggaggcaaagcgangccatgccctcatgtgcttggcacgtgtttcactcttcctctgcgctctaaccctatccgctgctcacggaagcaccacggttcaagacatcgcgagaaagttgaaactcggggacaacgagcttctgcgcacggagaagaagttcaaggttttcatggagaattacgggaggagctactccacagagg
